(19) United States
(12) Patent Application Publication
(10) Pub. No.: US 2005/0287667 A1
(43) Pub. Date: Dec. 29, 2005

(54) Methods and compositions for the inhibition of gene expression

(75) Inventors: Reza Sheikhnejad, Southfield, MI (US); Mina Patel Sooch, Bloomfield, MI (US); Neal Goodwin, Plainwell, MI (US); David Olson, Ann Arbor, MI (US)

Correspondence Address: Tanya A. Arenson;MEDLEN & CARROLL, LLP, 101 Howard Street, Suite 350, San Francisco, CA, 94105, US

(73) Assignee: ProNAi Therapeutics, Inc., Kalamazoo, MI (US)

(21) Appl. No.: 10/858,341

(22) Filed: Jun. 1, 2004

(51) Int. Cl. C12N 15/85; C12N 15/88

(52) U.S. Cl. 435/455; 435/458

(57) ABSTRACT

The present invention relates to methods and compositions for the inhibition of gene expression. In particular, the present invention provides oligonucleotide-based therapeutics for the inhibition of oncogenes involved in cancers.

### FIELD OF THE INVENTION

[0001] The present invention relates to methods and compositions for the inhibition of gene expression. In particular, the present invention provides oligonucleotide-based therapeutics for the inhibition of oncogenes involved in cancers.

### BACKGROUND OF THE INVENTION

[0002] Oncogenes have become the central concept in understanding cancer biology and may provide valuable targets for therapeutic drugs. All oncogenes and their products operate inside the cell. This makes protein-based drugs ineffective since their specificity involves ligand-receptor recognition.

[0003] Antisense oligodeoxyribonucleotides (oligonucleotides) are under investigation of therapeutic compound for specifically targeting oncogenes (Wickstrom, E. (ed). Prospects for antisense nucleic acid therapy of cancer and Aids. New York: Wiley-Liss, Inc. 1991; Murray, J. A. H. (ed). Antisense RNA and DNA New York: Wiley-Liss, Inc. 1992). Antisense drugs are modified synthetic oligonucleotides that work by interfering with ribosomal translation of the target mRNA. The antisense drugs developed thus far destroy the targeted mRNA by binding to it and triggering ribonuclease H (RNase H) degradation of mRNA. Oligonucleotides have a half-life of about 20 minutes and they are therefore rapidly degraded in most cells (Fisher, T. L. et al., Nucleic Acids Res. 21:3857-3865 (1993)). To increase the stability of oligonucleotides, they are often chemically modified, e.g., they are protected by a sulfur replacing one of the phosphate oxygens in the backbone (phosphorothioate) (Milligan, J. F. et al., J. Med. Chem. 36:1923-1937 (1993); Wagner, R. W. et al., Science 260:1510-1513 (1993)). However, this modification can only slow the degradation of antisense and therefore large dosages of antisense drug are required to be effective.

[0004] Despite the optimism surrounding the use of antisense therapies, there are a number of serious problems with the use of antisense drugs such as difficulty in getting a sufficient amount of antisense into the cell, non-sequence-specific effects, toxicity due to the large amount of sulfur containing phosphothioates oligonucleotides and their inability to get into their target cells, and high cost due to continuous delivery of large doses. An additional problem with antisense drugs has been their nonspecific activities.

[0005] What is needed are additional non-protein based cancer therapeutics that target oncogenes. Therapeutics that are effective in low doses and that are non-toxic to the subject are particularly needed.

### SUMMARY OF THE INVENTION

[0006] The present invention relates to methods and compositions for the inhibition of gene expression. In particular, the present invention provides oligonucleotide-based therapeutics for the inhibition of oncogenes involved in cancers.

[0007] Accordingly, in some embodiments, the present invention provides a composition comprising a first oligonucleotide that hybridizes to the promoter region of a c-ki-Ras gene under physiological conditions (e.g., SEQ ID NOs: 47, 48, 50 or 53). In certain embodiments, at least one of the cytosine bases (e.g., all) of the first oligonucleotide are 5-methylcytosine. In some embodiments, the hybridization of the first oligonucleotide to the promoter region of c-ki-Ras gene inhibits expression of the c-ki-Ras gene. In certain embodiments, the c-ki-Ras gene is on a chromosome of a cell, and the hybridization of the first oligonucleotide to the promoter region of c-ki-Ras reduces proliferation of the cell. In some embodiments, the composition further comprises a second oligonucleotide. In some embodiments, the at least one of the cytosine bases in the second oligonucleotide is 5-methylcytosine. In other embodiments, all of the cytosine bases in the second oligonucleotide are 5-methylcytosine. In some embodiments, the second oligonucleotide comprises SEQ ID NOs: 47, 48, 50 or 53, wherein the second oligonucleotide is different than the first oligonucleotide (e.g., if the second oligonucleotide has the sequence of SEQ ID NO:47, the first oligonucleotide has a sequence other than SEQ ID NO:47, etc.). In certain embodiments, the second oligonucleotide hybridizes to a promoter region of a second gene, wherein the second gene is not c-ki-Ras. In some embodiments, the second gene is an oncogene (e.g., including, but not limited to, c-Ha-Ras, c-myc, Her-2, TGF-α, and bcl-2).

[0008] In yet other embodiments, the present invention provides a composition comprising an oligonucleotide that hybridizes to a promoter region of a c-ki-Ras gene at a position comprising between nucleotides 1 and 289 of SEQ ID NO: 46 or between nucleotides 432 and 658 of SEQ ID NO: 46.

[0009] In other embodiments, the present invention provides a method, comprising providing an oligonucleotide that hybridizes to the promoter of a c-ki-Ras gene (e.g., an oligonucleotide comprising SEQ ID NOs: 47, 48, 50 or 53); and a cell comprising a c-ki-Ras gene that is capable of being expressed, and wherein the cell is capable of proliferation; and introducing the oligonucleotide to the cell. In some embodiments, the oligonucleotide comprising at least one CG dinucleotide pair, wherein at least one of the cytosine bases in the CG dinucleotide pair comprises 5-methylcytosine. In other embodiments, all of the cytosine bases in the CG dinucleotide pairs of the oligonucleotide are 5-methylcytosine. In some embodiments, the oligonucleotide hybridizes to a promoter region of a c-ki-Ras gene at a position comprising between nucleotides 1 and 289 of SEQ ID NO: 46 or between nucleotides 432 and 658 of SEQ ID NO: 46. In some embodiments, the oligonucleotide is between 15 and 30 bases in length.

[0010] In some preferred embodiments, the introducing results in the reduction of proliferation of the cell. In some embodiments, the introducing results in inhibition of expression of the c-ki-Ras gene. In some embodiments, the cell is a cancer cell (e.g., including, but not limited to, pancreatic cancer, colon cancer, breast cancer, bladder cancer, lung cancer, leukemia, prostate, lymphoma, ovarian, and melanoma). In some embodiments, the cell is in a host animal. In some embodiments, the host animal is a non-human mammal. In some embodiments, the oligonucleotide is introduced to the host animal at a dosage of between 0.01 μg to 100 g, and preferably between 1 mg to 100 mg per kg of body weight. In some embodiments, the oligonucleotide is introduced to the host animal one or more times per day. In other embodiments, the oligonucleotide is introduced to the host animal continuously (e.g., for a period of between 2 hours and 2 weeks). In other embodiments, the cell is in cell culture. In certain embodiments, the method further comprises the step of introducing a test compound to the cell. In some embodiments, the test compound is a known chemotherapy agent.

[0011] In some embodiments, the method further provides a drug delivery system. In some embodiments, the drug delivery system comprises a liposome (e.g., a liposome comprising a neutral lipid or a lipid like compound). In some embodiments, the drug delivery system comprises a cell targeting component (e.g., a ligand or ligand like molecule for a cell surface receptor or a nuclear receptor). In certain embodiments, the drug delivery system is for use in vivo, and the oligonucleotide and the liposome are present in the ratio of from 2:1 to 1:3/1 μg to 100 mg per kg body weight.

[0012] In still further embodiments, the present invention provides a composition comprising an oligonucleotide that hybridizes under physiological conditions to the promoter region of a c-ki-Ras gene, wherein at least one (e.g., all) of the cytosine bases in the oligonucleotide is 5-methylcytosine. In some embodiments, the oligonucleotide is completely complementary to the promoter region of the c-ki-Ras gene. In other embodiments, the oligonucleotide is partially complementary to the promoter region of the c-ki-Ras gene. Fore example, in certain embodiments, the oligonucleotide contains one mismatch to the promoter region of the c-ki-Ras gene. In some preferred embodiments, the oligonucleotide is complementary only to the promoter region of the c-ki-Ras gene and is not completely complementary to other regions of the human genome. In some embodiments, the oligonucleotide is between 10 nucleotides and 60, and preferably between 15 and 35 nucleotides in length.

[0013] The present invention further provides a composition comprising an oligonucleotide that hybridizes under physiological conditions to the promoter region of a c-ki-Ras gene under conditions such that expression of the c-ki-Ras gene is inhibited.

[0014] The present invention additionally provides a composition comprising an oligonucleotide that hybridizes under physiological conditions to the promoter region of a c-ki-Ras gene located on a chromosome of a cell under conditions such that proliferation of the cell is reduced.

[0015] The present invention also provides a composition comprising a first oligonucleotide that hybridizes under physiological conditions to the promoter region of a c-ki-Ras gene, the oligonucleotide comprising at least on CG dinucleotide pair, wherein at least one of the cytosine bases in the CG dinucleotide pair comprises 5-methylcytosine; and a second oligonucleotide, the second oligonucleotide comprising at least on CG dinucleotide pair, wherein at least one of the cytosine bases in the CG dinucleotide pair comprises 5-methylcytosine.

[0016] In certain embodiments, the present invention provides a kit comprising an oligonucleotide that hybridizes under physiological conditions to the promoter region of a c-ki-Ras gene, the oligonucleotide comprising at least on CG dinucleotide pair, wherein at least one of the cytosine bases in the CG dinucleotide pair comprises 5-methylcytosine; and instructions for using the kit for reducing proliferation of a cell comprising a c-ki-Ras gene on a chromosome of the cell or inhibiting gene expression. In some embodiments, the composition in the kit are used for treating cancer in a subject and the instructions comprise instructions for using the kit to treat cancer in the subject. In some embodiments, the instructions are instructions required by the U.S. Food and Drug Agency for labeling of pharmaceuticals.

[0017] The present invention also provides a method, comprising: providing a biological sample from a subject diagnosed with a cancer; and reagents for detecting the present or absence of expression of a oncogene in the sample; and detecting the presence or absence of expression of an oncogene in the sample; administering an oligonucleotide that hybridizes under physiological conditions to the promoter region of an oncogene expressed in the biological sample, the oligonucleotide comprising at least on CG dinucleotide pair, wherein at least one of the cytosine bases in the CG dinucleotide pair comprises 5-methylcytosine to the subject.

[0018] The present invention additionally provides a method of inhibiting the expression of a gene in a subject (e.g., for the treatment of cancer or other hyperproliferative disorders) comprising providing an oligonucleotide that hybridizes under physiological conditions to the promoter region of a gene involved in cancer or a hyperproliferative disorder expressed in the biological sample, the oligonucleotide comprising at least on CG dinucleotide pair, wherein at least one of the cytosine bases in the CG dinucleotide pair comprises 5-methylcytosine; and administering the oligonucleotide to the subject under conditions such that expression of the gene is inhibited. In some embodiments, the subject is a human.

[0019] In yet further embodiments, the present invention provides a method of screening compounds comprising providing a cell comprising a suspected oncogene; and an oligonucleotide that hybridizes to the promoter region of the gene; and administering the oligonucleotide to the cell; and determining if proliferation of the cell is inhibited in the presence of the oligonucleotide relative to the absence of the oligonucleotide. In some embodiments, the cell is in culture (e.g., a cancer cell line). In other embodiments, the cell is in a host animal (e.g., a non-human mammal). In some embodiments, the method is a high-throughput screening method.

### DESCRIPTION OF THE FIGURES

[0020] FIG. 1 shows the nucleic acid sequence of the bcl-2 gene (SEQ ID NO: 1).

[0021] FIG. 2 shows the sequences of antigenes to bcl-2 used in some embodiments of the present invention. X refers to a methylated C nucleotide.

[0022] FIG. 3 shows the nucleic acid sequence of the c-erbB-2 (Her-2) gene (SEQ ID NO:29).

[0023] FIG. 4 shows the sequences of antigenes to c-erbB-2 used in some embodiments of the present invention. X refers to a methylated C nucleotide.

[0024] FIG. 5 shows the nucleic acid sequence of the c-ki-Ras gene (SEQ ID NO:46).

[0025] FIG. 6 shows the sequences of antigenes to c-ki-Ras used in some embodiments of the present invention. X refers to a methylated C nucleotide.

[0026] FIG. 7 shows the nucleic acid sequence of the c-Ha-Ras gene (SEQ ID NO:66).

[0027] FIG. 8 shows the sequences of antigenes to c-Ha-Ras used in some embodiments of the present invention. X refers to a methylated C nucleotide.

[0028] FIG. 9 shows the nucleic acid sequence of the c-myc gene (SEQ ID NO:108).

[0029] FIG. 10 shows the sequences of antigenes to c-myc used in some embodiments of the present invention. X refers to a methylated C nucleotide.

[0030] FIG. 11 shows the nucleic acid sequence of the TGF-α gene (SEQ ID NO:131).

[0031] FIG. 12 shows the sequences of antigenes to TGF-α used in some embodiments of the present invention. X refers to a methylated C nucleotide.

[0032] FIG. 13 shows the inhibition of expression of cell growth by antigenes to c-ki-Ras used in some embodiments of the present invention

[0033] FIG. 14 shows the inhibition of expression of cell growth by antigenes to bcl-2 used in some embodiments of the present invention.

[0034] FIG. 15 shows the inhibition of expression of cell growth by antigenes to c-erb-2 used in some embodiments of the present invention.

[0035] FIG. 16 shows the inhibition of expression of cell growth by antigenes to c-Ha-Ras used in some embodiments of the present invention.

[0036] FIG. 17 shows the inhibition of expression of cell growth by antigenes to c-myc used in some embodiments of the present invention.

[0037] FIG. 18 shows the inhibition of expression of cell growth by antigenes to TGF-α used in some embodiments of the present invention.

[0038] FIG. 19 shows the dose response curve of inhibition of expression of cell growth by antigenes to c-ki-Ras.

[0039] FIG. 20 shows the dose response curve of inhibition of expression of cell growth of FSCCL cells (A) and MCF-7 cells (B) by antigenes to bcl-2.

[0040] FIG. 21 shows the dose response curve of inhibition of expression of cell growth by antigenes to c-erb-2.

[0041] FIG. 22 shows the dose response curve of inhibition of expression of cell growth by antigenes to c-Ha-Ras used.

[0042] FIG. 23 shows the dose response curve of inhibition of expression of cell growth by antigenes to c-myc.

[0043] FIG. 24 shows the dose response curve of inhibition of expression of cell growth of T47D cells (A) and MDA-MB-231 cells (B) by antigenes to TGF-α.

[0044] FIG. 25 shows exemplary variants of antigenes to c-ki-Ras.

[0045] FIG. 26 shows exemplary variants of antigenes to bcl-2.

[0046] FIG. 27 shows exemplary variants of antigenes to c-erb-2.

[0047] FIG. 28 shows exemplary variants of antigenes to c-ha-ras.

[0048] FIG. 29 shows exemplary variants of antigenes to c-myc.

[0049] FIG. 30 shows exemplary variants of antigenes to TGF-α.

[0050] FIG. 31 shows inhibition of lymphoma cells by non-methylated oligonucleotides targeted toward Bcl-2.

### DEFINITIONS

[0051] To facilitate an understanding of the present invention, a number of terms and phrases are defined below:

[0052] As used herein, the term “under conditions such that expression of said gene is inhibited” refers to conditions where an oligonucleotide of the present invention hybridizes to a gene (e.g., the promoter region of the gene) and inhibits transcription of the gene by at least 10%, preferably at least 25%, even more preferably at least 50%, and still more preferably at least 90% relative to the level of transcription in the absence of the oligonucleotide. The present invention is not limited to the inhibition of expression of a particular gene. Exemplary genes include, but are not limited to, c-ki-Ras, c-Ha-ras, c-myc, her-2, TGF-α, and bcl-2.

[0053] As used herein, the term “under conditions such that growth of said cell is reduced” refers to conditions where an oligonucleotide of the present invention, when administered to a cell (e.g., a cancer) reduces the rate of growth of the cell by at least 10%, preferably at least 25%, even more preferably at least 50%, and still more preferably at least 90% relative to the rate of growth of the cell in the absence of the oligonucleotide.

[0054] The term “epitope” as used herein refers to that portion of an antigen that makes contact with a particular antibody.

[0055] When a protein or fragment of a protein is used to immunize a host animal, numerous regions of the protein may induce the production of antibodies which bind specifically to a given region or three-dimensional structure on the protein; these regions or structures are referred to as “antigenic determinants”. An antigenic determinant may compete with the intact antigen (i.e., the “immunogen” used to elicit the immune response) for binding to an antibody.

[0056] As used herein, the term “subject” refers to any animal (e.g., a mammal), including, but not limited to, humans, non-human primates, rodents, and the like, which is to be the recipient of a particular treatment. Typically, the terms “subject” and “patient” are used interchangeably herein in reference to a human subject.

[0057] As used herein, the terms “computer memory” and “computer memory device” refer to any storage media readable by a computer processor. Examples of computer memory include, but are not limited to, RAM, ROM, computer chips, digital video disc (DVDs), compact discs (CDs), hard disk drives (HDD), and magnetic tape.

[0058] As used herein, the term “computer readable medium” refers to any device or system for storing and providing information (e.g., data and instructions) to a computer processor. Examples of computer readable media include, but are not limited to, DVDs, CDs, hard disk drives, magnetic tape and servers for streaming media over networks.

[0059] As used herein, the terms “processor” and “central processing unit” or “CPU” are used interchangeably and refer to a device that is able to read a program from a computer memory (e.g., ROM or other computer memory) and perform a set of steps according to the program.

[0060] As used herein, the term “non-human animals” refers to all non-human animals including, but are not limited to, vertebrates such as rodents, non-human primates, ovines, bovines, ruminants, lagomorphs, porcines, caprines, equines, canines, felines, aves, etc. and and non-vertebrate animals such as drosophila and nematode. In some embodiments, “non-human animals” further refers to prokaryotes and viruses such as bacterial pathogens, viral pathogens.

[0061] As used herein, the term “nucleic acid molecule” refers to any nucleic acid containing molecule, including but not limited to, DNA or RNA. The term encompasses sequences that include any of the known base analogs of DNA and RNA including, but not limited to, 4-acetylcytosine, 8-hydroxy-N6-methyladenosine, aziridinylcytosine, pseudoisocytosine, 5-(carboxyhydroxylmethyl) uracil, 5-fluorouracil, 5-bromouracil, 5-carboxymethylaminomethyl-2-thiouracil, 5-carboxymethylaminomethyluracil, dihydrouracil, inosine, N6-isopentenyladenine, 1-methyladenine, 1-methylpseudouracil, 1-methylguanine, 1-methylinosine, 2,2-dimethylguanine, 2-methyladenine, 2-methylguanine, 3-methylcytosine, 5-methylcytosine, N6-methyladenine, 7-methylguanine, 5-methylaminomethyluracil, 5-methoxyaminomethyl-2-thiouracil, beta-D-mannosylqueosine, 5′-methoxycarbonylmethyluracil, 5-methoxyuracil, 2-methylthio-N6-isopentenyladenine, uracil-5-oxyacetic acid methylester, uracil-5-oxyacetic acid, oxybutoxosine, pseudouracil, queosine, 2-thiocytosine, 5-methyl-2-thiouracil, 2-thiouracil, 4-thiouracil, 5-methyluracil, N-uracil-5-oxyacetic acid methylester, uracil-5-oxyacetic acid, pseudouracil, queosine, 2-thiocytosine, and 2,6-diaminopurine.

[0062] The term “gene” refers to a nucleic acid (e.g., DNA) sequence that comprises coding sequences necessary for the production of a polypeptide, precursor, or RNA (e.g., rRNA, tRNA). The polypeptide can be encoded by a full length coding sequence or by any portion of the coding sequence so long as the desired activity or functional properties (e.g., enzymatic activity, ligand binding, signal transduction, immunogenicity, etc.) of the full-length or fragment are retained. The term also encompasses the coding region of a structural gene and the sequences located adjacent to the coding region on both the 5′ and 3′ ends for a distance of about 1 kb or more on either end such that the gene corresponds to the length of the full-length mRNA. Sequences located 5′ of the coding region and present on the mRNA are referred to as 5′ non-translated sequences. Sequences located 3′ or downstream of the coding region and present on the mRNA are referred to as 3′ non-translated sequences. The term “gene” encompasses both cDNA and genomic forms of a gene. A genomic form or clone of a gene contains the coding region interrupted with non-coding sequences termed “introns” or “intervening regions” or “intervening sequences.” Introns are segments of a gene that are transcribed into nuclear RNA (hnRNA); introns may contain regulatory elements such as enhancers. Introns are removed or “spliced out” from the nuclear or primary transcript; introns therefore are absent in the messenger RNA (mRNA) transcript. The mRNA functions during translation to specify the sequence or order of amino acids in a nascent polypeptide.

[0063] As used herein, the term “heterologous gene” refers to a gene that is not in its natural environment. For example, a heterologous gene includes a gene from one species introduced into another species. A heterologous gene also includes a gene native to an organism that has been altered in some way (e.g., mutated, added in multiple copies, linked to non-native regulatory sequences, etc). Heterologous genes are distinguished from endogenous genes in that the heterologous gene sequences are typically joined to DNA sequences that are not found naturally associated with the gene sequences in the chromosome or are associated with portions of the chromosome not found in nature (e.g., genes expressed in loci where the gene is not normally expressed).

[0064] As used herein, the term “gene expression” refers to the process of converting genetic information encoded in a gene into RNA (e.g., mRNA, rRNA, tRNA, or snRNA) through “transcription” of the gene (i.e., via the enzymatic action of an RNA polymerase), and for protein encoding genes, into protein through “translation” of mRNA. Gene expression can be regulated at many stages in the process. “Up-regulation” or “activation” refers to regulation that increases the production of gene expression products (i.e., RNA or protein), while “down-regulation” or “repression” refers to regulation that decrease production. Molecules (e.g., transcription factors) that are involved in up-regulation or down-regulation are often called “activators” and “repressors,” respectively.

[0065] In addition to containing introns, genomic forms of a gene may also include sequences located on both the 5′ and 3′ end of the sequences that are present on the RNA transcript. These sequences are referred to as “flanking” sequences or regions (these flanking sequences are located 5′ or 3′ to the non-translated sequences present on the mRNA transcript). The 5′ flanking region may contain regulatory sequences such as promoters and enhancers that control or influence the transcription of the gene. The 3′ flanking region may contain sequences that direct the termination of transcription, post-transcriptional cleavage and polyadenylation.

[0066] The term “wild-type” refers to a gene or gene product isolated from a naturally occurring source. A wild-type gene is that which is most frequently observed in a population and is thus arbitrarily designed the “normal” or “wild-type” form of the gene. In contrast, the term “modified” or “mutant” refers to a gene or gene product that displays modifications in sequence and or functional properties (i.e., altered characteristics) when compared to the wild-type gene or gene product. It is noted that naturally occurring mutants can be isolated; these are identified by the fact that they have altered characteristics (including altered nucleic acid sequences) when compared to the wild-type gene or gene product.

[0067] As used herein, the terms “nucleic acid molecule encoding,” “DNA sequence encoding,” and “DNA encoding” refer to the order or sequence of deoxyribonucleotides along a strand of deoxyribonucleic acid. The order of these deoxyribonucleotides determines the order of amino acids along the polypeptide (protein) chain. The DNA sequence thus codes for the amino acid sequence.

[0068] As used herein, the terms “an oligonucleotide having a nucleotide sequence encoding a gene” and “polynucleotide having a nucleotide sequence encoding a gene,” means a nucleic acid sequence comprising the coding region of a gene or in other words the nucleic acid sequence that encodes a gene product. The coding region may be present in a cDNA, genomic DNA or RNA form. When present in a DNA form, the oligonucleotide or polynucleotide may be single-stranded (i.e., the sense strand) or double-stranded. Suitable control elements such as enhancers/promoters, splice junctions, polyadenylation signals, etc. may be placed in close proximity to the coding region of the gene if needed to permit proper initiation of transcription and/or correct processing of the primary RNA transcript. Alternatively, the coding region utilized in the expression vectors of the present invention may contain endogenous enhancers/promoters, splice junctions, intervening sequences, polyadenylation signals, etc. or a combination of both endogenous and exogenous control elements.

[0069] As used herein, the term “oligonucleotide,” refers to a short length of single-stranded polynucleotide chain. Oligonucleotides are typically less than 200 residues long (e.g., between 8 and 100), however, as used herein, the term is also intended to encompass longer polynucleotide chains (e.g., as large as 5000 residues). Oligonucleotides are often referred to by their length. For example a 24 residue oligonucleotide is referred to as a “24-mer”. Oligonucleotides can form secondary and tertiary structures by self-hybridizing or by hybridizing to other polynucleotides. Such structures can include, but are not limited to, duplexes, hairpins, cruciforms, bends, and triplexes.

[0070] In some embodiments, oligonucleotides are “antigenes.” As used herein, the term “antigene” refers to an oligonucleotide that hybridizes to the promoter region of a gene. In some embodiments, the hybridization of the antigene to the promoter inhibits expression of the gene.

[0071] As used herein, the terms “complementary” or “complementarity” are used in reference to polynucleotides (i.e., a sequence of nucleotides) related by the base-pairing rules. For example, for the sequence “A-G-T,” is complementary to the sequence “T-C-A.”Complementarity may be “partial,” in which only some of the nucleic acids' bases are matched according to the base pairing rules. Or, there may be “complete” or “total” complementarity between the nucleic acids. The degree of complementarity between nucleic acid strands has significant effects on the efficiency and strength of hybridization between nucleic acid strands. This is of particular importance in amplification reactions, as well as detection methods that depend upon binding between nucleic acids.

[0072] As used herein, the term “completely complementary,” for example when used in reference to an oligonucleotide of the present invention refers to an oligonucleotide where all of the nucleotides are complementary to a target sequence (e.g., a gene).

[0073] As used herein, the term “partially complementary,” for example when used in reference to an oligonucleotide of the present invention, refers to an oligonucleotide where at least one nucleotide is not complementary to the target sequence. Preferred partially complementary oligonucleotides are those that can still hybridize to the target sequence under physiological conditions. The term “partially complementary” refers to oligonucleotides that have regions of one or more non-complementary nucleotides both internal to the oligonucleotide or at either end. Oligonucleotides with mismatches at the ends may still hybridize to the target sequence.

[0074] The term “homology” refers to a degree of complementarity. There may be partial homology or complete homology (i.e., identity). A partially complementary sequence is a nucleic acid molecule that at least partially inhibits a completely complementary nucleic acid molecule from hybridizing to a target nucleic acid is “substantially homologous.” The inhibition of hybridization of the completely complementary sequence to the target sequence may be examined using a hybridization assay (Southern or Northern blot, solution hybridization and the like) under conditions of low stringency. A substantially homologous sequence or probe will compete for and inhibit the binding (i.e., the hybridization) of a completely homologous nucleic acid molecule to a target under conditions of low stringency. This is not to say that conditions of low stringency are such that non-specific binding is permitted; low stringency conditions require that the binding of two sequences to one another be a specific (i.e., selective) interaction. The absence of non-specific binding may be tested by the use of a second target that is substantially non-complementary (e.g., less than about 30% identity); in the absence of non-specific binding the probe will not hybridize to the second non-complementary target.

[0075] When used in reference to a double-stranded nucleic acid sequence such as a cDNA or genomic clone, the term “substantially homologous” refers to any probe that can hybridize to either or both strands of the double-stranded nucleic acid sequence under conditions of low stringency as described above.

[0076] A gene may produce multiple RNA species that are generated by differential splicing of the primary RNA transcript. cDNAs that are splice variants of the same gene will contain regions of sequence identity or complete homology (representing the presence of the same exon or portion of the same exon on both cDNAs) and regions of complete non-identity (for example, representing the presence of exon “A” on cDNA 1 wherein cDNA 2 contains exon “B” instead). Because the two cDNAs contain regions of sequence identity they will both hybridize to a probe derived from the entire gene or portions of the gene containing sequences found on both cDNAs; the two splice variants are therefore substantially homologous to such a probe and to each other.

[0077] When used in reference to a single-stranded nucleic acid sequence, the term “substantially homologous” refers to any probe that can hybridize (i.e., it is the complement of) the single-stranded nucleic acid sequence under conditions of low stringency as described above.

[0078] As used herein, the term “hybridization” is used in reference to the pairing of complementary nucleic acids. Hybridization and the strength of hybridization (i.e., the strength of the association between the nucleic acids) is impacted by such factors as the degree of complementary between the nucleic acids, stringency of the conditions involved, the Tₘ of the formed hybrid, and the G:C ratio within the nucleic acids. A single molecule that contains pairing of complementary nucleic acids within its structure is said to be “self-hybridized.”

[0079] As used herein, the term “Tₘ” is used in reference to the “melting temperature.” The melting temperature is the temperature at which a population of double-stranded nucleic acid molecules becomes half dissociated into single strands. The equation for calculating the Tₘ of nucleic acids is well known in the art. As indicated by standard references, a simple estimate of the Tₘ value may be calculated by the equation: Tₘ=81.5+0.41(% G+C), when a nucleic acid is in aqueous solution at 1 M NaCl (See e.g., Anderson and Young, Quantitative Filter Hybridization, in Nucleic Acid Hybridization [1985]). Other references include more sophisticated computations that take structural as well as sequence characteristics into account for the calculation of Tₘ.

[0080] As used herein the term “stringency” is used in reference to the conditions of temperature, ionic strength, and the presence of other compounds such as organic solvents, under which nucleic acid hybridizations are conducted. Under “low stringency conditions” a nucleic acid sequence of interest will hybridize to its exact complement, sequences with single base mismatches, closely related sequences (e.g., sequences with 90% or greater homology), and sequences having only partial homology (e.g., sequences with 50-90% homology). Under “medium stringency conditions,” a nucleic acid sequence of interest will hybridize only to its exact complement, sequences with single base mismatches, and closely relation sequences (e.g., 90% or greater homology). Under “high stringency conditions,” a nucleic acid sequence of interest will hybridize only to its exact complement, and (depending on conditions such a temperature) sequences with single base mismatches. In other words, under conditions of high stringency the temperature can be raised so as to exclude hybridization to sequences with single base mismatches.

[0081] “High stringency conditions” when used in reference to nucleic acid hybridization comprise conditions equivalent to binding or hybridization at 42° C. in a solution consisting of 5×SSPE (43.8 g/l NaCl, 6.9 g/l NaH₂PO₄ H₂O and 1.85 g/l EDTA, pH adjusted to 7.4 with NaOH), 0.5% SDS, 5× Denhardt's reagent and 100 μg/ml denatured salmon sperm DNA followed by washing in a solution comprising 0.1×SSPE, 1.0% SDS at 42° C. when a probe of about 500 nucleotides in length is employed.

[0082] “Medium stringency conditions” when used in reference to nucleic acid hybridization comprise conditions equivalent to binding or hybridization at 42° C. in a solution consisting of 5×SSPE (43.8 g/l NaCl, 6.9 g/l NaH₂PO₄ H₂O and 1.85 g/l EDTA, pH adjusted to 7.4 with NaOH), 0.5% SDS, 5× Denhardt's reagent and 100 μg/ml denatured salmon sperm DNA followed by washing in a solution comprising 1.0×SSPE, 1.0% SDS at 42° C. when a probe of about 500 nucleotides in length is employed.

[0083] “Low stringency conditions” comprise conditions equivalent to binding or hybridization at 42° C. in a solution consisting of 5×SSPE (43.8 g/l NaCl, 6.9 g/l NaH₂PO₄ H₂O and 1.85 g/l EDTA, pH adjusted to 7.4 with NaOH), 0.1% SDS, 5× Denhardt's reagent [50× Denhardt's contains per 500 ml: 5 g Ficoll (Type 400, Pharamcia), 5 g BSA (Fraction V; Sigma)] and 100 μg/ml denatured salmon sperm DNA followed by washing in a solution comprising 5×SSPE, 0.1% SDS at 42° C. when a probe of about 500 nucleotides in length is employed.

[0084] The present invention is not limited to the hybridization of probes of about 500 nucleotides in length. The present invention contemplates the use of probes between approximately 8 nucleotides up to several thousand (e.g., at least 5000) nucleotides in length. One skilled in the relevant understands that stringency conditions may be altered for probes of other sizes (See e.g., Anderson and Young, Quantitative Filter Hybridization, in Nucleic Acid Hybridization [1985] and Sambrook et al., Molecular Cloning: A Laboratory Manual, Cold Spring Harbor Press, NY [1989]).

[0085] The art knows well that numerous equivalent conditions may be employed to comprise low stringency conditions; factors such as the length and nature (DNA, RNA, base composition) of the probe and nature of the target (DNA, RNA, base composition, present in solution or immobilized, etc.) and the concentration of the salts and other components (e.g., the presence or absence of formamide, dextran sulfate, polyethylene glycol) are considered and the hybridization solution may be varied to generate conditions of low stringency hybridization different from, but equivalent to, the above listed conditions. In addition, the art knows conditions that promote hybridization under conditions of high stringency (e.g., increasing the temperature of the hybridization and/or wash steps, the use of formamide in the hybridization solution, etc.) (see definition above for “stringency”).

[0086] As used herein, the term “physiological conditions” refers to specific stringency conditions that approximate or are conditions inside an animal (e.g., a human). Exemplary physiological conditions for use in vitro include, but are not limited to, 37° C., 95% air, 5% CO₂, commercial medium for culture of mammalian cells (e.g., DMEM media available from Gibco, Md.), 5-10% serum (e.g., calf serum or horse serum), additional buffers, and optionally hormone (e.g., insulin and epidermal growth factor).

[0087] The term “isolated” when used in relation to a nucleic acid, as in “an isolated oligonucleotide” or “isolated polynucleotide” refers to a nucleic acid sequence that is identified and separated from at least one component or contaminant with which it is ordinarily associated in its natural source. Isolated nucleic acid is such present in a form or setting that is different from that in which it is found in nature. In contrast, non-isolated nucleic acids as nucleic acids such as DNA and RNA found in the state they exist in nature. For example, a given DNA sequence (e.g., a gene) is found on the host cell chromosome in proximity to neighboring genes; RNA sequences, such as a specific mRNA sequence encoding a specific protein, are found in the cell as a mixture with numerous other mRNAs that encode a multitude of proteins. However, isolated nucleic acid encoding a given protein includes, by way of example, such nucleic acid in cells ordinarily expressing the given protein where the nucleic acid is in a chromosomal location different from that of natural cells, or is otherwise flanked by a different nucleic acid sequence than that found in nature. The isolated nucleic acid, oligonucleotide, or polynucleotide may be present in single-stranded or double-stranded form. When an isolated nucleic acid, oligonucleotide or polynucleotide is to be utilized to express a protein, the oligonucleotide or polynucleotide will contain at a minimum the sense or coding strand (i.e., the oligonucleotide or polynucleotide may be single-stranded), but may contain both the sense and anti-sense strands (i.e., the oligonucleotide or polynucleotide may be double-stranded).

[0088] As used herein, the term “purified” or “to purify” refers to the removal of components (e.g., contaminants) from a sample. For example, antibodies are purified by removal of contaminating non-immunoglobulin proteins; they are also purified by the removal of immunoglobulin that does not bind to the target molecule. The removal of non-immunoglobulin proteins and/or the removal of immunoglobulins that do not bind to the target molecule results in an increase in the percent of target-reactive immunoglobulins in the sample. In another example, recombinant polypeptides are expressed in bacterial host cells and the polypeptides are purified by the removal of host cell proteins; the percent of recombinant polypeptides is thereby increased in the sample.

[0089] “Amino acid sequence” and terms such as “polypeptide” or “protein” are not meant to limit the amino acid sequence to the complete, native amino acid sequence associated with the recited protein molecule.

[0090] The term “native protein” as used herein to indicate that a protein does not contain amino acid residues encoded by vector sequences; that is, the native protein contains only those amino acids found in the protein as it occurs in nature. A native protein may be produced by recombinant means or may be isolated from a naturally occurring source.

[0091] As used herein the term “portion” when in reference to a protein (as in “a portion of a given protein”) refers to fragments of that protein. The fragments may range in size from four amino acid residues to the entire amino acid sequence minus one amino acid.

[0092] The term “Southern blot,” refers to the analysis of DNA on agarose or acrylamide gels to fractionate the DNA according to size followed by transfer of the DNA from the gel to a solid support, such as nitrocellulose or a nylon membrane. The immobilized DNA is then probed with a labeled probe to detect DNA species complementary to the probe used. The DNA may be cleaved with restriction enzymes prior to electrophoresis. Following electrophoresis, the DNA may be partially depurinated and denatured prior to or during transfer to the solid support. Southern blots are a standard tool of molecular biologists (J. Sambrook et al., Molecular Cloning: A Laboratory Manual, Cold Spring Harbor Press, NY, pp 9.31-9.58 [1989]).

[0093] The term “Northern blot,” as used herein refers to the analysis of RNA by electrophoresis of RNA on agarose gels to fractionate the RNA according to size followed by transfer of the RNA from the gel to a solid support, such as nitrocellulose or a nylon membrane. The immobilized RNA is then probed with a labeled probe to detect RNA species complementary to the probe used. Northern blots are a standard tool of molecular biologists (J. Sambrook, et al., supra, pp 7.39-7.52 [1989]).

[0094] The term “Western blot” refers to the analysis of protein(s) (or polypeptides) immobilized onto a support such as nitrocellulose or a membrane. The proteins are run on acrylamide gels to separate the proteins, followed by transfer of the protein from the gel to a solid support, such as nitrocellulose or a nylon membrane. The immobilized proteins are then exposed to antibodies with reactivity against an antigen of interest. The binding of the antibodies may be detected by various methods, including the use of radiolabeled antibodies.

[0095] As used herein, the term “cell culture” refers to any in vitro culture of cells. Included within this term are continuous cell lines (e.g., with an immortal phenotype), primary cell cultures, transformed cell lines, finite cell lines (e.g., non-transformed cells), and any other cell population maintained in vitro.

[0096] As used, the term “eukaryote” refers to organisms distinguishable from “prokaryotes.” It is intended that the term encompass all organisms with cells that exhibit the usual characteristics of eukaryotes, such as the presence of a true nucleus bounded by a nuclear membrane, within which lie the chromosomes, the presence of membrane-bound organelles, and other characteristics commonly observed in eukaryotic organisms. Thus, the term includes, but is not limited to such organisms as fungi, protozoa, and animals (e.g., humans).

[0097] As used herein, the term “in vitro” refers to an artificial environment and to processes or reactions that occur within an artificial environment. In vitro environments can consist of, but are not limited to, test tubes and cell culture. The term “in vivo” refers to the natural environment (e.g., an animal or a cell) and to processes or reaction that occur within a natural environment.

[0098] The terms “test compound” and “candidate compound” refer to any chemical entity, pharmaceutical, drug, and the like that is a candidate for use to treat or prevent a disease, illness, sickness, or disorder of bodily function (e.g., cancer). Test compounds comprise both known and potential therapeutic compounds. A test compound can be determined to be therapeutic by screening using the screening methods of the present invention. In some embodiments of the present invention, test compounds include antisense compounds.

[0099] As used herein, the term “known chemotherapeutic agents” refers to compounds known to be useful in the treatment of disease (e.g., cancer). Exemplary chemotherapeutic agents affective against cancer include, but are not limited to, daunorubicin, dactinomycin, doxorubicin, bleomycin, mitomycin, nitrogen mustard, chlorambucil, melphalan, cyclophosphamide, 6-mercaptopurine, 6-thioguanine, cytarabine (CA), 5-fluorouracil (5-FU), floxuridine (5-FUdR), methotrexate (MTX), colchicine, vincristine, vinblastine, etoposide, teniposide, cisplatin and diethylstilbestrol (DES).

[0100] As used herein, the term “sample” is used in its broadest sense. In one sense, it is meant to include a specimen or culture obtained from any source, as well as biological and environmental samples. Biological samples may be obtained from animals (including humans) and encompass fluids, solids, tissues, and gases. Biological samples include blood products, such as plasma, serum and the like. Environmental samples include environmental material such as surface matter, soil, water, crystals and industrial samples. Such examples are not however to be construed as limiting the sample types applicable to the present invention.

### DETAILED DESCRIPTION OF THE INVENTION

[0101] The present invention relates to methods and compositions for the treatment of cancers. In particular, the present invention provides oligonucleotide-based therapeutics for the inhibition of oncogenes involved in a variety of cancers. The present invention is not limited to the treatment of a particular cancer. Any cancer can be targeted, including, but not limited to, breast cancers. The present invention is also not limited to the targeting of cancers or oncogenes. The methods and compositions of the present invention are suitable for use with any gene that it is desirable to inhibit the expression of (e.g., for therapeutic or research uses).

I. Oncogene Targets

[0102] In some embodiments, the present invention provides antigene inhibitors of oncogenes. The present invention is not limited to the inhibition of a particular oncogene. Indeed, the present invention encompasses antigene inhibitors to any number of oncogenes including, but not limited to, those disclosed herein.

[0103] A. Ras

[0104] One gene which has captured the attention of many scientists is the human proto-oncogene, c-Ha-ras. The nucleic acid sequence of the promoter region of c-H-ras is shown in FIG. 7. This gene acts as a central dispatcher, relaying chemical signals into cells and controlling cell division. Ras gene alteration may cause the gene to stay in the “on” position. The ras oncogene is believed to underlie up to 30% of cancer, including colon cancer, lung cancer, bladder and mammary carcinoma (Bos, Cancer Res. 49:4682-4689 [1989]). The ras oncogene has therefore become a target for therapeutic drugs.

[0105] There are several reports showing that oligonucleotides complementary to various sites of ras mRNA can inhibit synthesis of ras protein (p21), which decreases the cell proliferation rate in cell culture (U.S. Pat. No. 5,576,208; U.S. Pat. No. 5,582,986; Daska et al., Oncogene Res. 5:267-275 [1990]; Brown et al., Oncogene Res. 4:243-252 [1989]; Saison-Behmoaras et al., EMBO J. 10:1111-1116 [1991)]. Oligonucleotides complementary to the 5′ flanking region of the c-Ha-ras RNA transcript have shown to inhibit tumor growth in nude mice for up to 14 days (Gray et al., Cancer Res. 53:577-580 [1993]). It was recently reported that an antisense oligonucleotide directed to a point mutation (G>C) in codon 12 of the c-Ha-ras mRNA inhibited cell proliferation as well as tumor growth in nude mice when it was injected subcutaneously (U.S. Pat. No. 5,576,208; U.S. Pat. No. 5,582,986; Schwab et al., Proc. Natl. Acad. Sci. USA 91:10460-10464 [1994]; each of which is herein incorporated by reference). Researchers have also reported that antisense drugs shrank ovarian tumors in small clinical trials (Roush et al., Science 276:1192-1194 [1997]).

[0106] B. Her-2

[0107] The HER-2 (also known as neu oncogene or erbB-2) oncogene encodes a receptor-like tyrosine kinase (RTK) that has been extensively investigated because of its role in several human carcinomas (Hynes and Stern, Biochim. et Biophy. Acta 1198:165-184 [1994]; Dougall et al., Oncogene 9:2109-2123 [1994]) and in mammalian development (Lee et al., Nature 378:394-398 [1995]). The nucleic acid sequence of the promoter region of Her-2 is shown in FIG. 3. The sequence of the HER-2 protein was determined from a cDNA that was cloned by homology to the epidermal growth factor receptor (EGFR) mRNA from placenta (Coussens et al., Science 230:1132-1139 [1985]) and from a gastric carcinoma cell line (Yamamoto et al., Nature 319:230-234 [1986]). The HER-2 mRNA was shown to be about 4.5 kb (Coussens et al., Science 230:1132-1139 [1985]; Yamamoto et al., Nature 319:230-234 [1986]) and encodes a transmembrane glycoprotein of 185 kDa in normal and malignant human tissues (p185HER-2) (Hynes and Steen, Biochim. et Biophys. Acta 1198:165-184 [1994]; Dougall et al., Oncogene 9:2109-2123 [1994]). Overexpression of HER-2 causes phenotypic transformation of cultured cells (DiFiore et al., Science 237:178-182 [1987]; Hudziak et al., Proc. Natl. Acad. Sci. USA 84:7159-7163 [1987]) and has been associated with aggressive clinical progression of breast and ovarian cancer (Slamon et al., Science 235:177-182 [1987]; Slamon et al., Science 244:707-712 [1989]).

[0108] HER-2 is one of the most frequently altered genes in cancer. It encodes a transmembrane receptor (also known as p185) with tyrosine kinase activity and is a member of the epidermal growth factor (EGF) family, and thus is related to the epidermal growth factor receptor (EGFR or HER-1). Aberrant HER-2 gene expression is present in a wide variety of cancers and are most common in breast, ovarian and gastric cancers. HER-2 is overexpressed in 25-30% of all human breast and ovarian cancers. Levels of HER-2 overexpression correlate well with clinical stage of breast cancer, prognosis and metastatic potential. Overexpression of HER-2 is associated with lower survival rates, increased relapse rates and increased metastatic potential. Tan et al., (Cancer Res., 57:1199 [1997]) have shown that overexpression of the HER-2 gene increases the metastatic potential of breast cancer cells without increasing their transformation ability.

[0109] Aberrant expression of HER-2 includes both increased expression of normal HER-2 and expression of mutant HER-2. Activation of the HER-2 proto-oncogene can occur by any of three mechanisms-point mutation, gene amplification and overexpression. Gene amplification is the most common mechanism. Unlike the other EGF family members for whom ligand activation is necessary for promoting transformation, overexpression of HER-2 alone is sufficient for transformation (Cohen, et al., J. Biol. Chem., 271:30897 [1996]).

[0110] Several therapeutic approaches have been used to reduce levels of the HER-2 gene product. The adenovirus type 5 gene product E1A has been studied as a potential therapeutic using a breast cancer model in nude mice. This gene product can repress HER-2/neu overexpression by repressing HER-2/neu promoter activity, and suppress the tumorigenic potential of HER-2/neu-overexpressing ovarian cancer cells. In mice bearing HER-2/neu-overexpressing breast cancer xenografts, E1A delivered either by adenovirus or liposome significantly inhibited tumor growth and prolonged mouse survival compared with the controls (Chang et al., Oncogene 14:561 [1997])

[0111] Clinical trials have been conducted to evaluate a bispecific antibody which targets the extracellular domains of both the HER-2/neu protein product and Fc gamma RIII (CD16), the Fc gamma receptor expressed by human natural killer cells, neutrophils, and differentiated mononuclear phagocytes (Weiner et al., J. Hematotherapy, 4:471 [1995]).

[0112] Overexpression of HER-2 has also been found to be associated with increased resistance to chemotherapy. Thus, patients with elevated levels of HER-2 respond poorly to many drugs. Methods used to inhibit HER-2 expression have been combined with commonly used chemotherapeutic agents (Ueno et al., Oncogone 15:953 [1997]). Combining the adenovirus type 5 gene product, E1A, with taxol showed a synergistic effect in human breast cancer cells. Zhang et al., (Oncogene, 12:571 [1996]) demonstrated that emodin, a tyrosine-specific inhibitor, sensitized non-small cell lung cancer (NSCLC) cells to a variety of chemotherapeutic drugs, including cisplatin, doxorubicin and etoposide. A HER-2 antibody was found to increase the efficacy of tamoxifen in human breast cancer cells (Witters et al., Breast Cancer Res. and Treatment, 42:1 [1997]).

[0113] Oligonucleotides have also been used to study the function of HER-2. A triplex-forming oligonucleotide targeted to the HER-2 promoter, 42 to 69 nucleotides upstream of the mRNA transcription start site was found to inhibit HER-2 expression in vitro (Ebbinghaus et al., J. Clin. Invest., 92:2433 [1993]). Porumb et al. (Cancer Res., 56:515 [1996]) also used a triplex-forming oligonucleotide targeted to the same HER-2 promoter region. Decreases in HER-2 mRNA and protein levels were seen in cultured cells. Juhl et al. (J. Biol. Chem., 272:29482 [1997]) used anti-HER-2 ribozymes targeted to a central region of the HER-2 RNA just downstream of the transmembrane region of the protein to demonstrate a reduction in HER-2 mRNA and protein levels in human ovarian cancer cells. A reduction in tumor growth in nude mice was also seen.

[0114] An antisense approach has been used as a potential therapeutic for HER-2 overexpressing cancers. Pegues et al. (Cancer Lett., 117:73 [1997]) cloned a 1.5 kb fragment of HER-2 in an antisense orientation into an expression vector; transfecting of this construct into ovarian cancer cells resulted in a reduction of anchorage-independent growth. Casalini et al. (Int. J. Cancer 72:631 [1997]) used several human HER-2 antisense vector constructs, containing HER-2 fragments from 151 bp to 415 bp in length, to demonstrate reduction in HER-2 protein levels and anchorage-independent growth in lung adenocarcinoma cells. Colomer et al. (Br. J. Cancer, 70:819 [1994]) showed that phosphodiester antisense oligonucleotides targeted at or immediately downstream of, the translation initiation codon inhibited proliferation of human breast cancer cells by up to 60%. Wiechen et aL. (Int. J. Cancer 63:604 [1995]) demonstrated that an 18-nucleotide phosphorothioate oligonucleotide targeted to the coding region, 33 nucleotides downstream of the translation initiation codon, of HER-2 reduced anchorage-independent growth of ovarian cancer cells. Bertram et al. (Biochem. Biophys. Res. Commun., 200:661 [1994]) used antisense phosphorothioate oligonucleotides targeted to the translation initiation region and a sequence at the 3′ part of the translated region of the mRNA which has high homology to a tyrosine kinase consensus sequence, and demonstrated a 75% reduction in HER-2 protein levels in human breast cancer cells. Liu et al., (Antisense and Nucleic Acid Drug Develop., 6:9 [1996]) used antisense phosphorothioate oligonucleotides targeted to the 5′ cap site and coding region. The most effective oligonucleotide, targeted to the 5′ cap site, reduced HER-2 protein expression by 90%. Cell proliferation was also reduced by a comparable amount. Vaughn et al. (Nuc. Acids. Res., 24:4558 [1996]) used phosphorothioate, phosphorodithioate and chimeric antisense oligonucleotides targeted at or adjacent to (either side) the translation initiation region of HER-2. An alternating dithioate/diester oligonucleotide targeted to the translation initiation region worked slightly better than an all phosphorothioate oligonucleotide. Brysch et al. (Cancer Gene Ther., 1: 99 [1994]) used chemically modified antisense oligonucleotides targeted to the translation initiation codon of HER-2 to reduce protein levels and cause growth arrest of human breast cancer cell line.

[0115] C. C-Myc

[0116] The c-myc gene product is encoded by an immediate early response gene, the expression of which can be induced by various mitogens. The nucleic acid sequence of the promoter region of the c-myc gene is shown in FIG. 9. C-myc expression is involved in the signal transduction pathways leading to cell division. Studies have demonstrated that proliferating cells have higher levels of c-myc mRNA and c-myc protein than do quiescent cells. Antibodies directed against the human c-myc protein are known to inhibit DNA synthesis in nuclei isolated from human cells. Conversely, constitutive expression of c-myc produced by gene transfer inhibits induced differentiation of several cell lines. Constitutive expression of c-myc predisposes transgenic mice to the development of tumors.

[0117] Some studies have suggested that the c-myc gene product may play a proliferative role in SMCs. Balloon de-endothelialization and injury of rat aortas is known to increase c-myc mRNA expression of vascular SMC prior to their subsequent proliferation and migration. Also, SMCs in culture proliferate when exposed to several mitogens, including PDGF, FGF, EGF, IGF-1 and to serum. Each of these mitogens has been found to be capable of increasing the expression in other cell lines of either c-myc protein, c-myc mRNA, or both. Additionally, blood serum has been found to increase c-myc mRNA levels in SMCs.

[0118] Harel-Bellan et al. (J. Immun. 140; 2431-2435 (1988)) demonstrated that antisense oligonucleotides complementary to c-myc mRNA effectively inhibited the translation thereof in human T cells. These T cells were prevented from entering the S phase of cell division. c-myc proto-oncogene sequences are described in Marcu et al., Ann. Rev. Biochem., 61:809-860 [1992]; Watt et al., Nature, 303:725-728 [1983)]; Battey et al., Cell, 34:779-787 (1983); and Epstein et al, NTIS publication PB93-100576

[0119] D. Bcl2

[0120] In many types of human tumors, including lymphomas and leukemias, the human bcl-2 gene is overexpressed, and may be associated with tumorigenicity (Tsujimoto et al., Science 228:1440-1443 [1985]). The nucleic acid sequence of the promoter region of bcl-2 is shown in FIG. 1. High levels of expression of the human bcl-2 gene have been found in all lymphomas with t (14; 18) chromosomal translocations including most follicular B cell lymphomas and many large cell non-Hodgkin's lymphomas. High levels of expression of the bcl-2 gene have also been found in certain leukemias that do not have a t(14; 18) chromosomal translation, including most cases of chronic lymphocytic leukemia acute, many lymphocytic leukemias of the pre-B cell type, neuroblastomas, nasophryngeal carcinomas, and many adenocarcinomas of the prostate, breast, and colon. (Reed et al., Cancer Res. 51:6529 [1991]; Yunis et al., New England J. Med. 320:1047; Campos et al., Blood 81:3091-3096 [1993]; McDonnell et al., Cancer Res. 52:6940-6944 [1992); Lu et al., Int. J Cancer 53:29-35 [1993]; Bonner et al., Lab Invest. 68:43A [1993]).

[0121] E. TGF-α

[0122] Transforming Growth Factor Alpha (TGF-α) is a polypeptide of 50 amino acids. The nucleic acid sequence of the TGF-α promoter is shown in FIG. 11. It was first isolated from a retrovirus-transformed mouse cell line and subsequently was identified in human tumor cells, in early rat embryo cells and in cell cultures from the human pituitary gland. TGF-α is closely related to Epidermal Growth Factor (EGF), both structurally and functionally, and both bind to the same receptor, i.e., Epidermal Growth Factor Receptor (EGFR).

[0123] The sequence and three dimensional structure of both EGF and TGF-α have been determined (Campbell et al., Prog. Growth Factor Res. 1:13 [1989]). TGF-α is a 50 amino acid polypeptide having about 40% homology of residues with EGF. Both peptides are characterized by three well defined loops (denoted A, B and C) and have three intramolecular disulphide bonds.

[0124] Several growth factors, including TGF-α and EGF, are believed to exert their biological effects via interaction with the Epidermal Growth Factor Receptor (EGF Receptor). The EGF Receptor is a Type 1 receptor tyrosine kinase. The EGF Receptor and its ligands are of interest for their roles in normal physiological processes as well as in hyperproliferative and neoplastic diseases.

[0125] The in vivo precursor of TGF-α is a 160 amino acid residue membrane-bound protein (pro-TGF-.alpha.) that is cleaved to yield a soluble compound (Massague, J. Biol. Chem., 265:21393-21396 [1990]). This cleavage removes an extracellular portion comprised of 50 amino acids with a molecular weight of 6 Kd and is considered to be an important regulatory event (Pandiella et al., Proc. Natl. Acad. Sci. USA, 88:1726-1730 [1990]) that can be stimulated by phorbol esters acting via protein kinase C (Pandiella et al., J. Biol. Chem., 266:5769-5773 [1991]).

[0126] Cultured human prostatic tumor lines contain elevated levels of TGF-α mRNA and proliferate in response to TGF-α (Wilding et al., The Prostate, 15:1-12 [1989]). TGF-α appears to have both autocrine and paracrine function, stimulating physiologic activities such as cell division and angiogenesis. When induced in transgenic mice, TGF-α produced epithelial hyperplasia and focal dysplastic changes that resembled carcinoma in situ (Sandgren et al., Cell, 61:1121-1135 [1990]).

[0127] F. c-ki-RAS

[0128] The c-Ki-RAS (KRAS) oncogene is expressed ubiquitously. KRAS, with a length of more than 30 kb, is much larger than HRAS or NRAS. The sequence of the promoter region of c-ki-ras is shown in FIG. 5. Although the 3 ras genes, HRAS, KRAS, and NRAS, have different genetic structures, all code for proteins of 189 amino acid residues, generically designated p21. These genes acquire malignant properties by single point mutations that affect the incorporation of the 12th or 61st amino acid residue of their respective p21. KRAS is involved in malignancy much more often than is HRAS. In a study of 96 human tumors or tumor cell lines in the NIH 3T3 transforming system, (Pulciani et al., Nature 300: 539 (1982) found a mutated HRAS locus only in T24 bladder cancer cells, whereas transforming KRAS genes were identified in 8 different carcinomas and sarcomas.

[0129] In a serous cystadenocarcinoma of the ovary, Feig et al. (Science 223: 698 (1984)) showed the presence of an activated KRAS oncogene not activated in normal cells of the same patient. The transforming gene product displayed an electrophoretic mobility in SDS-polyacrylamide gels that differed from the mobility of KRAS transforming proteins in other tumors. Thus, a previously undescribed mutation was responsible for activation of KRAS in this ovarian carcinoma. To study the role of oncogenes in lung cancer, Rodenhuis et al. (New Eng. J Med. 317: 929 (1987)) used an assay based on oligonucleotide hybridization following an in vitro amplification step. Genomic DNA was examined from 39 tumor specimens obtained at thoracotomy. The KRAS gene was found to be activated by point mutations in codon 12 in 5 of 10 adenocarcinomas. Two of these tumors were less than 2 cm in size and had not metastasized. No HRAS, KRAS, or NRAS mutations were observed in 15 squamous cell carcinomas, 10 large cell carcinomas, 1 carcinoid, 2 metastatic adenocarcinomas from primary tumors outside the lung, and 1 small cell carcinoma. An approximately 20-fold amplification of the unmutated KRAS gene was observed in a tumor that proved to be a solitary lung metastasis of a rectal carcinoma. Yanez et al. (Oncogene 1:315 (1987)) found mutations in codon 12 of the KRAS gene in 4 of 16 colon cancers, 2 of 27 lung cancers, and 1 of 8 breast cancers; no mutations were found at position 61. Of the 6 possible amino acid replacements in codon 12, all but one were represented in the 7 mutations identified.

[0130] G. Other Oncogene Targets

[0131] The present invention is not limited to the oncogenes described above. The methods of the present invention are suitable for use with any oncogene with a known promoter region. Exemplary oncogenes included, but are not limited to, BCR/ABL, ABL1/BCR, ABL, BCL1, CD24, CDK4, EGFR/ERBB-1, HSTF1, INT1/WNT1, INT2, MDM2, MET, MYB, MYC, MYCN, MYCL1, RAF1, NRAS, REL, AKT2, APC, BCL2-ALPHA, BCL2-BETA, BCL3, BCR, BRCA1, BRCA2, CBL, CCND1, CDKN1A, CDKN1C, CDKN2A, CDKN2B, CRK, CRK-II, CSF1R/FMS, DBL, DDOST, DCC, DPC4/SMAD4, E-CAD, E2F1/RBAP, ELK1, ELK3, EPH, EPHA1, E2F1, EPHA3, ERG, ETS1, ETS2, FER, FGR, FLI1/ERGB2, FOS, FPS/FES, FRA1, FRA2, FYN, HCK, HEK, HER3/ERBB-2, ERBB-3, HER4/ERBB-4, HST2, INK4A, INK4B, JUN, JUNB, JUND, KIP2, KIT, KRAS2A, KRAS2B, LCK, LYN, MAS, MAX, MCC, MLH1, MOS, MSH2, MYBA, MYBB, NF1, NF2, P53, PDGFB, PIM1, PTC, RB1, RET, ROS1, SKI, SRC1, TAL1, TGFBR2, THRA1, THRB, TIAM1, TRK, VAV, VHL, WAF1, WNT2, WT1, YES1, ALK/NPM1, AMI1, AXL, FMS, GIP, GLI, GSP, HOX11, HST, IL3, INT2, KS3, K-SAM, LBC, LMO-1, LMO-2, L-MYC, LYL1, LYT-10, MDM-2, MLH1, MLL, MLM, N-MYC, OST, PAX-5, PMS-1, PMS-2, PRAD-1, RAF, RHOM-1, RHOM-2, SIS, TAL2, TAN1, TIAM1, TSC2, TRK, TSC1, STK11, PTCH, MEN1, MEN2, P57/KIP2, PTEN, HPC1, ATM, XPA/XPG, BCL6, DEK, AKAP13, CDH1, BLM, EWSR1/FLI1, FES, FGF3, FGF4, FGF6, FANCA, FLI1/ERGB2, FOSL1, FOSL2, GLI, HRAS1, HRX/MLLT1, HRX/MLLT2, KRAS2, MADH4, MAS1, MCF2, MLLT1/MLL, MLLT2/HRX, MTG8/RUNX1, MYCLK1, MYH11/CBFB, NFKB2, NOTCH1, NPM1/ALK, NRG/REL, NTRK1, PBX1/TCF3, PML/RARA, PRCA1, RUNX1, RUNX1/CBFA2T1, SET, TCF3/PBX1, TGFB1, TLX1, P53, WNT1, WNT2, WT1, αv-β3, PKCA, TNFα, Clusterin, Surviving, TGFβ, c-fos, c-SRC, and INT-1.

II. Non-Oncogene Targets

[0132] The present invention is not limited to the targeting of oncogenes. The methods and compositions of the present invention find use in the targeting of any gene that it is desirable to down regulate the expression of. For example, in some embodiments, the genes to be targeted include, but are not limited to, an immunoglobulin or antibody gene, a clotting factor gene, a protease, a pituitary hormone, a protease inhibitor, a growth factor, a somatomedian, a gonadotrophin, a chemotactin, a chemokine, a plasma protein, a plasma protease inhibitor, an interleukin, an interferon, a cytokine, a transcription factor, or a pathogen target (e.g., a viral gene, a bacterial gene, a microbial gene, a fungal gene).

[0133] Examples of specific genes include, but are not limited to, ADAMTS4, ADAMTS5, APOA1, APOE, APP, B2M, COX2, CRP, DDX25, DMC1, FKBP8, GH1, GHR, IAPP, IFNA1, IFNG, IL1, I110, IL12, IL13, IL2, IL4, IL7, IL8, IPW, MAPK14, Mei1, MMP13, MYD88, NDN, PACE4, PRNP, PSEN1, PSEN2, RAD51, RAD51C, SAP, SNRPN, TLR4, TLR9, TTR, UBE3A, VLA-4, and PTP-1B, c-RAF, m-TOR, LDL, VLDL, ApoB-100, HDL, VEGF, rhPDGF-BB, NADs, ICAM-1, MUC1, 2-dG, CTL, PSGL-1, E2F, NF-kB, HIF, and GCPRs.

[0134] In other embodiments and gene from a pathogen is targeted. Exemplary pathogens include, but are not limited to, Human Immunodeficiency virus, Hepatitis B virus, hepatitis C virus, hepatitis A virus, respiratory syncytial virus, pathogens involved in severe acute respiratory syndrome, west nile virus, and food borne pathogens (e.g., E. coli).

III. DNA Methylation

[0135] In some embodiments, the present invention provides oligonucleotide therapeutics that are methylated at specific sites. The present invention is not limited to a particular mechanism. Indeed, an understanding of the mechanism is not necessary to practice the present invention. Nonetheless, it is contemplated that one mechanism for the regulation of gene activity is methylation of cytosine residues in DNA. 5-methylcytosine (5-MeC) is the only naturally occurring modified base detected in DNA (Ehrlick et al., Science 212:1350-1357 (1981)). Although not all genes are regulated by methylation, hypomethylation at specific sites or in specific regions in a number of genes is correlated with active transcription (Doerfler, Annu. Rev. Biochem. 52:93-124 [1984]; Christman, Curr. Top. Microbiol. Immunol. 108:49-78 [1988]; Cedar, Cell 34:5503-5513 [1988]). DNA methylation in vitro can prevent efficient transcription of genes in a cell-free system or transient expression of transfected genes. Methylation of C residues in some specific cis-regulatory regions can also block or enhance binding of transcriptional factors or repressors (Doerfler, supra; Christman, supra; Cedar, Cell 34:5503-5513 (1988); Tate et al., Curr. Opin. Genet. Dev. 3:225-231 [1993]; Christman et al., Virus Strategies, eds. Doerfler, W. & Bohm, P. (VCH, Weinheim, N.Y.) pp. 319-333 [1993]).

[0136] Disruption of normal patterns of DNA methylation has been linked to the development of cancer (Christman et al., Proc. Natl. Acad. Sci. USA 92:7347-7351 [1995]). The 5-MeC content of DNA from tumors and tumor derived cell lines is generally lower than normal tissues (Jones et al., Adv. Cancer Res 40:1-30 [1983]). Hypomethylation of specific oncogenes such as c-myc, c-Ki-ras and c-Ha-ras has been detected in a variety of human and animal tumors (Nambu et al., Jpn. J. Cancer (Gann) 78:696-704 [1987]; Feinberg et al., Biochem. Biophys. Res. Commun. 111:47-54 [1983]; Cheah et al., JNCI73:1057-1063 [1984]; Bhave et al., Carcinogenesis (Lond) 9:343-348 [1988]. In one of the best studied examples of human tumor progression, it has been shown that hypomethylation of DNA is an early event in development of colon cancer (Goetz et al., Science 228:187-290 [1985]). Interference with methylation in vivo can lead to tumor formation. Feeding of methylation inhibitors such as L-methionine or 5-azacytodine or severe deficiency of 5-adenosine methionine through feeding of a diet depleted of lipotropes has been reported to induce formation of liver tumors in rats (Wainfan et al., Cancer Res. 52:2071s-2077s [1992]). Studies show that extreme lipotrope deficient diets can cause loss of methyl groups at specific sites in genes such as c-myc, ras and c-fos (Dizik et al., Carcinogenesis 12:1307-1312 [1991]). Hypomethylation occurs despite the presence of elevated levels of DNA MTase activity (Wainfan et al., Cancer Res. 49:4094-4097 [1989]). Genes required for sustained active proliferation become inactive as methylated during differentiation and tissue specific genes become hypomethylated and are active. Hypomethylation can then shift the balance between the two states. In some embodiment, the present invention thus takes advantage of this naturally occurring phenomena, to provide compositions and methods for site specific methylation of specific gene promoters, thereby preventing transcription and hence translation of certain genes. In other embodiments, the present invention provides methods and compositions for upregulating the expression of a gene of interest (e.g., a tumor suppressor gene) by altering the gene's methylation patterns.

[0137] The present invention is not limited to the use of methylated oligonucleotides. Indeed, the use of non-methylated oligonucleotides for the inhibition of gene expression is specifically contemplated by the present invention. Experiments conducted during the course of development of the present invention (See e.g., Example 8) demonstrated that an unmethylated oligonucleotide targeted toward Bcl-2 inhibited the growth of lymphoma cells to a level that was comparable to that of a methylated oligonucleotide.

IV. Oligonucleotides

[0138] In some embodiments, the present invention provides antigene oligonucleotides for inhibiting the expression of oncogenes. Exemplary design and production strategies for antigenes are described below. The below description is not intended to limit the scope of antigene compounds suitable for use in the present invention. One skilled in the relevant recognizes that additional antigenes are within the scope of the present invention.

[0139] A. Oligonucleotide Design

[0140] In some embodiments, oligonucleotides are designed based on preferred design criteria. Such oligonucleotides can then be tested for efficacy using the methods disclosed herein. For example, in some embodiments, the oligonucleotides are methylated at least one, preferably at least two, and even more preferably, all of the CpG islands. In other embodiments, the oligonucleotides contain no methylation. The present invention is not limited to a particular mechanism. Indeed, an understanding of the mechanism is not necessary to practice the present invention. Nonetheless, it is contemplated that preferred oligonucleotides are those that have at least a 50% GC content and at least 2 GC dinucleotides. It is preferred that oligonucleotides do not self hybridize. In some embodiments, oligonucleotides are designed with at least 1 A or T to minimize self hybridization. In some embodiments, commercially available computer programs are used to survey oligonucleotides for the ability to self hybridize. Preferred oligonucleotides are at least 10, and preferably at least 15 nucleotides and no more than 100 nucleotides in length. Particularly preferred oligonucleotides are 18-24 nucleotides in length. In some embodiments, oligonucleotides comprise the universal protein binding sequences CGCCC and CGCG or the complements thereof.

[0141] It is also preferred that the oligonucleotide hybridize to a promoter region of a gene upstream from the TATA box of the promoter. It is also preferred that oligonucleotide compounds are not completely homologous to other regions of the human genome. The homology of the oligonucleotide compounds of the present invention to other regions of the genome can be determined using available search tools (e.g., BLAST, available at the Internet site of NCBI).

[0142] In some embodiments, oligonucleotides are designed to hybridize to regions of the promoter region of an oncogene known to be bound by proteins (e.g., transcription factors). Exemplary oligonucleotide compounds of the present invention are shown in FIGS. 2, 4, 6, 8, 10, and 12. The present invention is not limited to the oligonucleotides described herein. Other suitable oligonucleotides may be identified (e.g., using the criteria described above). Exemplary oligonucleotide variants of the disclosed oligonucleotides are shown in FIGS. 25-30. Candidate oligonucleotides may be tested for efficacy using any suitable method, including, but not limited to, those described in the illustrative examples below. Using the in vitro assay described in Examples 1 and 2 below, candidate oligonucleotides can be evaluated for their ability to prevent cell proliferation as a variety of concentrations. Particularly preferred oligonucleotides are those that inhibit gene expression of cell proliferation as a low concentration (e.g., less that 20 μM, and preferably, less than 10 μM in the in vitro assays disclosed herein).

[0143] B. Preferred Oligonucleotide Zones

[0144] In some embodiments, regions within the promoter region of an oncogene are further defined as preferred regions for hybridization of oligonucleotides. In some embodiments, these preferred regions are referred to as “hot zones.”

[0145] In some preferred embodiments, hot zones are defined based on oligonucleotide compounds that are demonstrated to be effective (see above section on oligonucleotides) and those that are contemplated to be effective based on the preferred criteria for oligonucleotides described above. Preferred hot zones encompass 10 bp upstream and downstream of each compound included in each hot zone and have at least 1 CG or more within an increment of 40 bp further upstream or downstream of each compound. In preferred embodiments, hot zones encompass a maximum of 100 bp upstream and downstream of each oligonucleotide compound included in the hot zone. In additional embodiments, hot zones are defined at beginning regions of each promoter. These hot zones are defined either based on effective sequence(s) or contemplated sequences and have a preferred maximum length of 200 bp. Based on the above described criteria, exemplary hot zones were designed. These hot zones are shown in Table 1. Numbering is based on the sequences described in the Figures of the present invention.

TABLE 1
Exemplary Hot Zones

| Gene | Hot Zones |
|---|---|
| Bcl-2 | 1-40 |
| | 161-350 |
| | 401-590 |
| | 1002-1260 |
| c-erbB-2 | 205-344 |
| | 382-435 |
| c-K-ras | 1-289 |
| | 432-658 |
| c-Ha-ras | 21-220 |
| | 233-860 |
| | 1411-1530 |
| | 1631-1722 |
| c-myc | 3-124 |
| | 165-629 |
| TGF-α | 1-90 |
| | 175-219 |
| | 261-367 |
| | 431-930 |
| | 964-1237 |

[0146] C. Preparation and Formulation of Oligonucleotides

[0147] Any of the known methods of oligonucleotide synthesis can be used to prepare the modified oligonucleotides of the present invention. In some embodiments utilizing methylated oligonucleotides the nucleotide, dC is replaced by 5-methyl-dC where appropriate, as taught by the present invention. The modified or unmodified oligonucleotides of the present invention are most conveniently prepared by using any of the commercially available automated nucleic acid synthesizers. They can also be obtained from commercial sources that synthesize custom oligonucleotides pursuant to customer specifications.

[0148] While oligonucleotides are a preferred form of compound, the present invention comprehends other oligomeric oligonucleotide compounds, including but not limited to oligonucleotide mimetics such as are described below. The oligonucleotide compounds in accordance with this invention preferably comprise from about 18 to about 30 nucleobases (i.e., from about 18 to about 30 linked bases), although both longer and shorter sequences may find use with the present invention.

[0149] Specific examples of preferred compounds useful with the present invention include oligonucleotides containing modified backbones or non-natural intemucleoside linkages. As defined in this specification, oligonucleotides having modified backbones include those that retain a phosphorus atom in the backbone and those that do not have a phosphorus atom in the backbone. For the purposes of this specification, modified oligonucleotides that do not have a phosphorus atom in their intemucleoside backbone can also be considered to be oligonucleosides.

[0150] Preferred modified oligonucleotide backbones include, for example, phosphorothioates, chiral phosphorothioates, phosphorodithioates, phosphotriesters, aminoalkylphosphotriesters, methyl and other alkyl phosphonates including 3′-alkylene phosphonates and chiral phosphonates, phosphinates, phosphoramidates including 3′-amino phosphoramidate and aminoalkylphosphoramidates, thionophosphoramidates, thionoalkylphosphonates, thionoalkylphosphotriesters, and boranophosphates having normal 3′-5′ linkages, 2′-5′ linked analogs of these, and those having inverted polarity wherein the adjacent pairs of nucleoside units are linked 3′-5′ to 5′-3′ or 2′-5′ to 5′-2′. Various salts, mixed salts and free acid forms are also included.

[0151] Preferred modified oligonucleotide backbones that do not include a phosphorus atom therein have backbones that are formed by short chain alkyl or cycloalkyl intemucleoside linkages, mixed heteroatom and alkyl or cycloalkyl intemucleoside linkages, or one or more short chain heteroatomic or heterocyclic intemucleoside linkages. These include those having morpholino linkages (formed in part from the sugar portion of a nucleoside); siloxane backbones; sulfide, sulfoxide and sulfone backbones; formacetyl and thioformacetyl backbones; methylene formacetyl and thioformacetyl backbones; alkene containing backbones; sulfamate backbones; methyleneimino and methylenehydrazino backbones; sulfonate and sulfonamide backbones; amide backbones; and others having mixed N, O, S and CH₂ component parts.

[0152] In other preferred oligonucleotide mimetics, both the sugar and the intemucleoside linkage (i.e., the backbone) of the nucleotide units are replaced with novel groups. The base units are maintained for hybridization with an appropriate nucleic acid target compound. One such oligomeric compound, an oligonucleotide mimetic that has been shown to have excellent hybridization properties, is referred to as a peptide nucleic acid (PNA). In PNA compounds, the sugar-backbone of an oligonucleotide is replaced with an amide containing backbone, in particular an aminoethylglycine backbone. The nucleobases are retained and are bound directly or indirectly to aza nitrogen atoms of the amide portion of the backbone. Representative United States patents that teach the preparation of PNA compounds include, but are not limited to, U.S. Pat. Nos. 5,539,082; 5,714,331; and 5,719,262, each of which is herein incorporated by reference. Further teaching of PNA compounds can be found in Nielsen et al., Science 254:1497 (1991).

[0153] In some embodiments, oligonucleotides of the invention are oligonucleotides with phosphorothioate backbones and oligonucleosides with heteroatom backbones, and in particular —CH₂, —NH—O—CH₂—, —CH₂—N(CH₃)—O—CH₂— [known as a methylene (methylimino) or MMI backbone], —CH₂—O—N(CH₃)—CH₂—, —CH₂—N(CH₃)—N(CH₃)—CH₂—, and —O—N(CH₃)—CH₂—CH₂— [wherein the native phosphodiester backbone is represented as —O—P—O—CH₂—] of the above referenced U.S. Pat. No. 5,489,677, and the amide backbones of the above referenced U.S. Pat. No. 5,602,240. Also preferred are oligonucleotides having morpholino backbone structures of the above-referenced U.S. Pat. No. 5,034,506.

[0154] Modified oligonucleotides may also contain one or more substituted sugar moieties. Preferred oligonucleotides comprise one of the following at the 2′ position: OH; F; O—, S—, or N-alkyl; O—, S—, or N-alkenyl; O—, S— or N-alkynyl; or O-alkyl-O-alkyl, wherein the alkyl, alkenyl and alkynyl may be substituted or unsubstituted C₁ to C₁₀ alkyl or C₂ to C₁₀ alkenyl and alkynyl. Particularly preferred are O[(CH₂)ₙO]ₘCH₃, O(CH₂)ₙOCH₃, O(CH₂)ₙNH₂, O(CH₂)ₙCH₃, O(CH₂)ₙONH₂, and O(CH₂)ₙON[(CH₂)ₙCH₃)]₂, where n and m are from 1 to about 10. Other preferred oligonucleotides comprise one of the following at the 2′ position: C₁ to C₁₀ lower alkyl, substituted lower alkyl, alkaryl, aralkyl, O-alkaryl or O-aralkyl, SH, SCH₃, OCN, Cl, Br, CN, CF₃, OCF₃, SOCH₃, SO₂CH₃, ONO₂, NO₂, N₃, NH₂, heterocycloalkyl, heterocycloalkaryl, aminoalkylamino, polyalkylamino, substituted silyl, an RNA cleaving group, a reporter group, an intercalator, a group for improving the pharmacokinetic properties of an oligonucleotide, or a group for improving the pharmacodynamic properties of an oligonucleotide, and other substituents having similar properties. A preferred modification includes 2′-methoxyethoxy (2′—O—CH₂CH₂OCH₃, also known as 2′-O-(2-methoxyethyl) or 2′-MOE) (Martin et al., Helv. Chim. Acta 78:486 [1995]) i.e., an alkoxyalkoxy group. A further preferred modification includes 2′-dimethylaminooxyethoxy (i.e., a O(CH₂)₂ON(CH₃)₂ group), also known as 2′-DMAOE, and 2′-dimethylaminoethoxyethoxy (also known in the art as 2′-O-dimethylaminoethoxyethyl or 2′-DMAEOE), i.e., 2′—O—CH₂—O—CH₂—N(CH₂)₂.

[0155] Other preferred modifications include 2′-methoxy(2′—O—CH₃), 2′-aminopropoxy(2′-OCH₂CH₂CH₂NH₂) and 2′-fluoro (2′-F). Similar modifications may also be made at other positions on the oligonucleotide, particularly the 3′ position of the sugar on the 3′ terminal nucleotide or in 2′-5′ linked oligonucleotides and the 5′ position of 5′ terminal nucleotide. Oligonucleotides may also have sugar mimetics such as cyclobutyl moieties in place of the pentofuranosyl sugar.

[0156] Oligonucleotides may also include nucleobase (often referred to in the art simply as “base”) modifications or substitutions. As used herein, “unmodified” or “natural” nucleobases include the purine bases adenine (A) and guanine (G), and the pyrimidine bases thymine (T), cytosine (C) and uracil (U). Modified nucleobases include other synthetic and natural nucleobases such as 5-methylcytosine (5-me-C), 5-hydroxymethyl cytosine, xanthine, hypoxanthine, 2-aminoadenine, 6-methyl and other alkyl derivatives of adenine and guanine, 2-propyl and other alkyl derivatives of adenine and guanine, 2-thiouracil, 2-thiothymine and 2-thiocytosine, 5-halouracil and cytosine, 5-propynyl uracil and cytosine, 6-azo uracil, cytosine and thymine, 5-uracil (pseudouracil), 4-thiouracil, 8-halo, 8-amino, 8-thiol, 8-thioalkyl, 8-hydroxyl and other 8-substituted adenines and guanines, 5-halo particularly 5-bromo, 5-trifluoromethyl and other 5-substituted uracils and cytosines, 7-methylguanine and 7-methyladenine, 8-azaguanine and 8-azaadenine, 7-deazaguanine and 7-deazaadenine and 3-deazaguanine and 3-deazaadenine. Further nucleobases include those disclosed in U.S. Pat. No. 3,687,808. Certain of these nucleobases are particularly useful for increasing the binding affinity of the oligomeric compounds of the invention. These include 5-substituted pyrimidines, 6-azapyrimidines and N-2, N-6 and O-6 substituted purines, including 2-aminopropyladenine, 5-propynyluracil and 5-propynylcytosine. 5-methylcytosine substitutions have been shown to increase nucleic acid duplex stability by 0.6-1.2° C. and are presently preferred base substitutions, even more particularly when combined with 2′-O-methoxyethyl sugar modifications.

[0157] Another modification of the oligonucleotides of the present invention involves chemically linking to the oligonucleotide one or more moieties or conjugates that enhance the activity, cellular distribution or cellular uptake of the oligonucleotide. Such moieties include but are not limited to lipid moieties such as a cholesterol moiety, cholic acid, a thioether, (e.g., hexyl-S-tritylthiol), a thiocholesterol, an aliphatic chain, (e.g., dodecandiol or undecyl residues), a phospholipid, (e.g., di-hexadecyl-rac-glycerol or triethylammonium 1,2-di-O-hexadecyl-rac-glycero-3-H-phosphonate), a polyamine or a polyethylene glycol chain or adamantane acetic acid, a palmityl moiety, or an octadecylamine or hexylamino-carbonyl-oxycholesterol moiety.

[0158] One skilled in the relevant art knows well how to generate oligonucleotides containing the above-described modifications. The present invention is not limited to the antisense oligonucleotides described above. Any suitable modification or substitution may be utilized.

[0159] It is not necessary for all positions in a given compound to be uniformly modified, and in fact more than one of the aforementioned modifications may be incorporated in a single compound or even at a single nucleoside within an oligonucleotide. The present invention also includes pharmaceutical compositions and formulations that include the antisense compounds of the present invention as described below.

[0160] D. Cocktails

[0161] In some embodiments, the present invention provides cocktails comprising two or more oligonucleotides directed towards promoter regions of genes (e.g., oncogenes). In some embodiments, the two oligonucleotides hybridize to different regions of the promoter of the same gene. In other embodiments, the two or more oligonucleotides hybridize to promoters of two different genes. The present invention is not limited to a particular mechanism. Indeed, an understanding of the mechanism is not necessary to practice the present invention. Nonetheless, it is contemplated that the combination of two or more compounds of the present invention provides an inhibition of cancer cell growth that is greater than the additive inhibition of each of the compounds administered separately.

V. Research Uses

[0162] The present invention is not limited to therapeutic applications. For example, in some embodiments, the present invention provides compositions and methods for the use of oligonucleotides as a research tool.

[0163] A. Kits

[0164] For example, in some embodiments, the present invention provides kits comprising oligonucleotides specific for inhibition of a gene of interest, and optionally cell lines (e.g., cancer cells lines) known to express the gene. Such kits find use, for example, in the identification of metabolic pathways or the involvement of genes in disease (e.g., cancer), as well as in diagnostic applications. In some embodiments, the kits further comprise buffer and other necessary reagents, as well as instructions for using the kits.

[0165] B. Target Validation

[0166] In some embodiments, the present invention provides methods and compositions for use in the validation of gene targets (e.g., genes suspected of being involved in disease). For example, in some embodiments, the expression of genes identified in broad screening applications (e.g., gene expression arrays) as being involved in disease is downregulated using the methods and compositions of the present invention. The methods and compositions of the present invention are suitable for use in vitro and in vivo (e.g., in a non-human animal) for the purpose of target validation. In other embodiments, the compounds of the present invention find use in transplantation research (e.g., HLA inhibition).

[0167] C. Drug Screening

[0168] In other embodiments, the methods and compositions of the present invention are used in drug screening applications. For example, in some embodiments, oligonucleotides of the present invention are administered to a cell (e.g., in culture or in a non-human animal) in order to inhibit the expression of a gene of interest. In some embodiments, the inhibition of the gene of interest mimics a physiological or disease condition. In other embodiments, an oncogene is inhibited. Test compounds (e.g., small molecule drugs or oligonucleotide mimetics) are then administered to the test cell and the effect of the test compounds is assayed.

[0169] The test compounds of the present invention can be obtained using any of the numerous approaches in combinatorial library methods known in the art, including biological libraries; peptoid libraries (libraries of molecules having the functionalities of peptides, but with a novel, non-peptide backbone, which are resistant to enzymatic degradation but which nevertheless remain bioactive; see, e.g., Zuckennann et al., J. Med. Chem. 37: 2678-85 [1994]); spatially addressable parallel solid phase or solution phase libraries; synthetic library methods requiring deconvolution; the ‘one-bead one-compound’ library method; and synthetic library methods using affinity chromatography selection. The biological library and peptoid library approaches are preferred for use with peptide libraries, while the other four approaches are applicable to peptide, non-peptide oligomer or small molecule libraries of compounds (Lam (1997) Anticancer Drug Des. 12:145).

[0170] Examples of methods for the synthesis of molecular libraries can be found in the art, for example in: DeWitt et al., Proc. Natl. Acad. Sci. U.S.A. 90:6909 [1993]; Erb et al., Proc. Nad. Acad. Sci. USA 91:11422 [1994]; Zuckermann et al., J. Med. Chem. 37:2678 [1994]; Cho et al., Science 261:1303 [1993]; Carrell et al., Angew. Chem. Int. Ed. Engl. 33.2059 [1994]; Carell et al., Angew. Chem. Int. Ed. Engl. 33:2061 [1994]; and Gallop etal., J. Med. Chem. 37:1233 [1994].

[0171] Libraries of compounds may be presented in solution (e.g., Houghten, Biotechniques 13:412-421 [1992]), or on beads (Lam, Nature 354:82-84 [1991]), chips (Fodor, Nature 364:555-556 [1993]), bacteria or spores (U.S. Pat. No. 5,223,409; herein incorporated by reference), plasmids (Cull et al., Proc. Nad. Acad. Sci. USA 89:18651869 [1992]) or on phage (Scott and Smith, Science 249:386-390 [1990]; Devlin Science 249:404-406 [1990]; Cwirla et al., Proc. NatI. Acad. Sci. 87:6378-6382 [1990]; Felici, J. Mol. Biol. 222:301 [1991]).

VI. Compositions and Delivery

[0172] In some embodiments, the oligonucleotide compounds of the present invention are formulated as pharmaceutical compositions for delivery to a subject as a pharmaceutical. The novel antigen compounds of the present invention find use in the treatment of a variety of disease states and conditions in which it is desirable to inhibit the expression of a gene or the growth of a cell. In some preferred embodiments, the compounds are used to treat disease states resulting from uncontrolled cell growth, for example including, but not limited to, cancer. The present invention is not limited to the treatment of a particular cancer. The oligonucleotide compounds of the present invention are suitable for the treatment of a variety of cancers including, but not limited to, breast, colon, lung, stomach, pancreatic, bladder, leukemia, and lymphoma. The below discussion provides exemplary, non-limiting examples of formulations and dosages.

[0173] A. Pharmaceutical Compositions

[0174] The present invention further provides pharmaceutical compositions (e.g., comprising the oligonucleotide compounds described above). The pharmaceutical compositions of the present invention may be administered in a number of ways depending upon whether local or systemic treatment is desired and upon the area to be treated. Administration may be topical (including ophthalmic and to mucous membranes including vaginal and rectal delivery), pulmonary (e.g., by inhalation or insufflation of powders or aerosols, including by nebulizer; intratracheal, intranasal, epidermal and transdermal), oral or parenteral. Parenteral administration includes intravenous, intraarterial, subcutaneous, intraperitoneal or intramuscular injection or infusion; or intracranial, e.g., intrathecal or intraventricular, administration.

[0175] Pharmaceutical compositions and formulations for topical administration may include transdermal patches, ointments, lotions, creams, gels, drops, suppositories, sprays, liquids and powders. Conventional pharmaceutical carriers, aqueous, powder or oily bases, thickeners and the like may be necessary or desirable.

[0176] Compositions and formulations for oral administration include powders or granules, suspensions or solutions in water or non-aqueous media, capsules, sachets or tablets. Thickeners, flavoring agents, diluents, emulsifiers, dispersing aids or binders may be desirable.

[0177] Compositions and formulations for parenteral, intrathecal or intraventricular administration may include sterile aqueous solutions that may also contain buffers, diluents and other suitable additives such as, but not limited to, penetration enhancers, carrier compounds and other pharmaceutically acceptable carriers or excipients.

[0178] Pharmaceutical compositions of the present invention include, but are not limited to, solutions, emulsions, and liposome-containing formulations. These compositions may be generated from a variety of components that include, but are not limited to, preformed liquids, self-emulsifying solids and self-emulsifying semisolids.

[0179] The pharmaceutical formulations of the present invention, which may conveniently be presented in unit dosage form, may be prepared according to conventional techniques well known in the pharmaceutical industry. Such techniques include the step of bringing into association the active ingredients with the pharmaceutical carrier(s) or excipient(s). In general the formulations are prepared by uniformly and intimately bringing into association the active ingredients with liquid carriers or finely divided solid carriers or both, and then, if necessary, shaping the product.

[0180] The compositions of the present invention may be formulated into any of many possible dosage forms such as, but not limited to, tablets, capsules, liquid syrups, soft gels, suppositories, and enemas. The compositions of the present invention may also be formulated as suspensions in aqueous, non-aqueous or mixed media. Aqueous suspensions may further contain substances that increase the viscosity of the suspension including, for example, sodium carboxymethylcellulose, sorbitol and/or dextran. The suspension may also contain stabilizers.

[0181] In one embodiment of the present invention the pharmaceutical compositions may be formulated and used as foams. Pharmaceutical foams include formulations such as, but not limited to, emulsions, microemulsions, creams, jellies and liposomes. While basically similar in nature these formulations vary in the components and the consistency of the final product.

[0182] Agents that enhance uptake of oligonucleotides at the cellular level may also be added to the pharmaceutical and other compositions of the present invention. For example, cationic lipids, such as lipofectin (U.S. Pat. No. 5,705,188), cationic glycerol derivatives, and polycationic molecules, such as polylysine (WO 97/30731), also enhance the cellular uptake of oligonucleotides.

[0183] The compositions of the present invention may additionally contain other adjunct components conventionally found in pharmaceutical compositions. Thus, for example, the compositions may contain additional, compatible, pharmaceutically-active materials such as, for example, antipruritics, astringents, local anesthetics or anti-inflammatory agents, or may contain additional materials useful in physically formulating various dosage forms of the compositions of the present invention, such as dyes, flavoring agents, preservatives, antioxidants, opacifiers, thickening agents and stabilizers. However, such materials, when added, should not unduly interfere with the biological activities of the components of the compositions of the present invention. The formulations can be sterilized and, if desired, mixed with auxiliary agents, e.g., lubricants, preservatives, stabilizers, wetting agents, emulsifiers, salts for influencing osmotic pressure, buffers, colorings, flavorings and/or aromatic substances and the like which do not deleteriously interact with the nucleic acid(s) of the formulation.

[0184] Compositions and formulations for oral administration include powders or granules, microparticulates, nanoparticulates, suspensions or solutions in water or non-aqueous media, capsules, gel capsules, sachets, tablets or minitablets. Thickeners, flavoring agents, diluents, emulsifiers, dispersing aids or binders may be desirable. Preferred oral formulations are those in which oligonucleotides of the invention are administered in conjunction with one or more penetration enhancers surfactants and chelators. Preferred surfactants include fatty acids and/or esters or salts thereof, bile acids and/or salts thereof. Prefered bile acids/salts include chenodeoxycholic acid (CDCA) and ursodeoxychenodeoxycholic acid (UDCA), cholic acid, dehydrocholic acid, deoxycholic acid, glucholic acid, glycholic acid, glycodeoxycholic acid, taurocholic acid, taurodeoxycholic acid, sodium tauro-24,25-dihydro-fusidate, sodium glycodihydrofusidate. Prefered fatty acids include arachidonic acid, undecanoic acid, oleic acid, lauric acid, caprylic acid, capric acid, myristic acid, palmitic acid, stearic acid, linoleic acid, linolenic acid, dicaprate, tricaprate, monoolein, dilaurin, glyceryl 1-monocaprate, 1-dodecylazacycloheptan-2-one, an acylcamitine, an acylcholine, or a monoglyceride, a diglyceride or a pharmaceutically acceptable salt thereof (e.g. sodium). Also prefered are combinations of penetration enhancers, for example, fatty acids/salts in combination with bile acids/salts. A particularly prefered combination is the sodium salt of lauric acid, capric acid and UDCA. Further penetration enhancers include polyoxyethylene-9-lauryl ether, polyoxyethylene-20-cetyl ether. Oligonucleotides of the invention may be delivered orally in granular form including sprayed dried particles, or complexed to form micro or nanoparticles. Oligonucleotide complexing agents include poly-amino acids; polyimines; polyacrylates; polyalkylacrylates, polyoxethanes, polyalkylcyanoacrylates; cationized gelatins, albumins, starches, acrylates, polyethyleneglycols (PEG) and starches; polyalkylcyanoacrylates; DEAE-derivatized polyimines, pollulans, celluloses and starches. Particularly preferred complexing agents include chitosan, N-trimethylchitosan, poly-L-lysine, polyhistidine, polyornithine, polyspermines, protamine, polyvinylpyridine, polythiodiethylamino-methylethylene P(TDAE), polyaminostyrene (e.g. p-amino), poly(methylcyanoacrylate), poly(ethylcyanoacrylate), poly(butylcyanoacrylate), poly(isobutylcyanoacrylate), poly(isohexylcynaoacrylate), DEAE-methacrylate, DEAE-hexylacrylate, DEAE-acrylamide, DEAE-albumin and DEAE-dextran, polymethylacrylate, polyhexylacrylate, poly(D,L-lactic acid), poly(DL-lactic-co-glycolic acid (PLGA), alginate, and polyethyleneglycol (PEG).

[0185] Certain embodiments of the invention provide pharmaceutical compositions containing (a) one or more oligonucleotide compounds and (b) one or more other chemotherapeutic agents that function by a non-oligonucleotide mechanism. Examples of such chemotherapeutic agents include, but are not limited to, anticancer drugs such as daunorubicin, dactinomycin, doxorubicin, bleomycin, mitomycin, nitrogen mustard, chlorambucil, melphalan, cyclophosphamide, 6-mercaptopurine, 6-thioguanine, cytarabine (CA), 5-fluorouracil (5-FU), floxuridine (5-FUdR), methotrexate (MTX), colchicine, vincristine, vinblastine, etoposide, teniposide, cisplatin and diethylstilbestrol (DES). Anti-inflammatory drugs, including but not limited to nonsteroidal anti-inflammatory drugs and corticosteroids, and antiviral drugs, including but not limited to ribivirin, vidarabine, acyclovir and ganciclovir, may also be combined in compositions of the invention. Other non-oligonucleotide chemotherapeutic agents are also within the scope of this invention. Two or more combined compounds may be used together or sequentially.

[0186] B. Delivery

[0187] The oligonucleotide compounds of the present invention may be delivered using any suitable method. In some embodiments, naked DNA is administered. In other embodiments, lipofection is utilized for the delivery of nucleic acids to a subject. In still further embodiments, oligonucleotides are modified with phosphothiolates for delivery (See e.g., U.S. Pat. No. 6,169,177, herein incorporated by reference).

[0188] In some embodiments, nucleic acids for delivery are compacted to aid in their uptake (See e.g., U.S. Pat. Nos. 6,008,366, 6,383,811 herein incorporated by reference). In some embodiment, compacted nucleic acids are targeted to a particular cell type (e.g., cancer cell) via a target cell binding moiety (See e.g., U.S. Pat. Nos. 5,844,107, 6,077,835, each of which is herein incorporated by reference).

[0189] In some embodiments, oligonucleotides are conjugated to other compounds to aid in their delivery. For example, in some embodiments, nucleic acids are conjugated to polyethylene glycol to aid in delivery (See e.g., U.S. Pat. Nos. 6,177,274, 6,287,591, 6,447,752, 6,447,753, and 6,440,743, each of which is herein incorporated by reference). In yet other embodiments, oligonucleotides are conjugated to protected graft copolymers, which are chargeable” drug nano-carriers (Pharmaln). In still further embodiments, the transport of oligonucleotides into cells is facilitated by conjugation to vitamins (Endocyte, Inc, West Lafayette, Ind.; See e.g., U.S. Pat. Nos. 5,108,921, 5,416,016, 5,635,382, 6,291,673 and WO 02/085908; each of which is herein incorporated by reference). In other embodiments, oligonucleotides are conjugated to nanoparticles (e.g., NanoMed Pharmaceuticals; Kalamazoo, Mich.).

[0190] In other embodiments, oligonucleotides are enclosed in lipids (e.g., liposomes or micelles) to aid in delivery (See e.g., U.S. Pat. Nos. 6,458,382, 6,429,200; each of which is herein incorporated by reference). In still further embodiments, oligonucleotides are complexed with additional polymers to aid in delivery (See e.g., U.S. Pat. Nos. 6,379,966, 6,339,067, 5,744,335; each of which is herein incorporated by reference and Intradigm Corp., Rockville, Md.).

[0191] In still further embodiments, the controlled high pressure delivery system developed by Mirus (Madison, Wis.) is utilized for delivery of oligonucleotides.

[0192] C. Dosages

[0193] Dosing is dependent on severity and responsiveness of the disease state to be treated, with the course of treatment lasting from several days to several months, or until a cure is effected or a diminution of the disease state is achieved. Optimal dosing schedules can be calculated from measurements of drug accumulation in the body of the patient. The administering physician can easily determine optimum dosages, dosing methodologies and repetition rates. Optimum dosages may vary depending on the relative potency of individual oligonucleotides, and the delivery means, and can generally be estimated based on EC₅₀s found to be effective in in vitro and in vivo animal models or based on the examples described herein. In general, dosage is from 0.01 μg to 100 g per kg of body weight, and may be given once or more daily, weekly, monthly or yearly. In some embodiments, dosage is continuous (e.g., intravenously) for a period of from several hours to several days or weeks. In some embodiments, treatment is given continuously for a defined period followed by a treatment free period. In some embodiments, the pattern of continuous dosing followed by a treatment free period is repeated several times (e.g., until the disease state is diminished).

[0194] The treating physician can estimate repetition rates for dosing based on measured residence times and concentrations of the drug in bodily fluids or tissues. Following successful treatment, it may be desirable to have the subject undergo maintenance therapy to prevent the recurrence of the disease state, wherein the oligonucleotide is administered in maintenance doses, ranging from 0.01 μg to 100 g, preferably from 1 mg to 50 mg, and even more preferably from 6 mg to 30 mg per kg of body weight, once or more daily, to once every 20 years.

VII. Customized Patient Care

[0195] In some embodiments, the present invention provides customized patient care. The compositions of the present invention are targeted to specific genes unique to a patient's diseae (e.g., cancer). For example, in some embodiments, a sample of the patient's cancer or other affected tissue (e.g., a biopsy) is first obtained. The biopsy is analyzed for the presence of expression of a particular gene (e.g., oncogene). In some preferred embodiments, the level of expression of an gene in a patient is analyzed. Expression may be detected by monitoring for the presence of RNA or DNA corresponding to a particular oncogene. Any suitable detection method may be utilized, including, but not limited to, those disclosed below.

[0196] Following the characterization of the gene expression pattern of a patient's gene of interest, a customized therapy is generated for each patient. In preferred embodiments, oligonucleotide compounds specific for genes that are aberrantly expressed in the patient (e.g., in a tumor) are combined in a treatment cocktail. In some embodiments, the treatment cocktail further includes additional chemotherapeutic agents (e.g., those described above). The cocktail is then administered to the patient as described above.

[0197] In some embodiments, the analysis of cancer samples and the selection of oligonucleotides for a treatment compound is automated. For example, in some embodiments, a software program that analyses the expression levels of a series of oncogenes to arrive at the optimum selection and concentration of oligonucleotides is utilized. In some embodiments, the analysis is performed by the clinical laboratory analyzing the patient sample and is transmitted to a second provider for formulation of the treatment cocktail. In some embodiments, the information is transmitted over the Internet, thus allowing for the shortest possible time in between diagnosis and the beginning of treatment.

[0198] A. Detection of RNA

[0199] In some embodiments, detection of oncogenes (e.g., including but not limited to, those disclosed herein) is detected by measuring the expression of corresponding mRNA in a tissue sample (e.g., cancer tissue). In other embodiments, expression of mRNA is measured in bodily fluids, including, but not limited to, blood, serum, mucus, and urine. In some preferred embodiments, the level of mRNA expression in measured quantitatively. RNA expression may be measured by any suitable method, including but not limited to, those disclosed below.

[0200] In some embodiments, RNA is detected by Northern blot analysis. Northern blot analysis involves the separation of RNA and hybridization of a complementary labeled probe. In other embodiments, RNA expression is detected by enzymatic cleavage of specific structures (INVADER assay, Third Wave Technologies; See e.g., U.S. Pat. Nos. 5,846,717, 6,090,543; 6,001,567; 5,985,557; and 5,994,069; each of which is herein incorporated by reference). The INVADER assay detects specific nucleic acid (e.g., RNA) sequences by using structure-specific enzymes to cleave a complex formed by the hybridization of overlapping oligonucleotide probes.

[0201] In still further embodiments, RNA (or corresponding cDNA) is detected by hybridization to a oligonucleotide probe). A variety of hybridization assays using a variety of technologies for hybridization and detection are available. For example, in some embodiments, TaqMan assay (PE Biosystems, Foster City, Calif.; See e.g., U.S. Pat. Nos. 5,962,233 and 5,538,848, each of which is herein incorporated by reference) is utilized. The assay is performed during a PCR reaction. The TaqMan assay exploits the 5′-3′ exonuclease activity of the AMPLITAQ GOLD DNA polymerase. A probe consisting of an oligonucleotide with a 5′-reporter dye (e.g., a fluorescent dye) and a 3′-quencher dye is included in the PCR reaction. During PCR, if the probe is bound to its target, the 5′-3′ nucleolytic activity of the AMPLITAQ GOLD polymerase cleaves the probe between the reporter and the quencher dye. The separation of the reporter dye from the quencher dye results in an increase of fluorescence. The signal accumulates with each cycle of PCR and can be monitored with a fluorimeter.

[0202] In yet other embodiments, reverse-transcriptase PCR (RT-PCR) is used to detect the expression of RNA. In RT-PCR, RNA is enzymatically converted to complementary DNA or “cDNA” using a reverse transcriptase enzyme. The cDNA is then used as a template for a PCR reaction. PCR products can be detected by any suitable method, including but not limited to, gel electrophoresis and staining with a DNA specific stain or hybridization to a labeled probe. In some embodiments, the quantitative reverse transcriptase PCR with standardized mixtures of competitive templates method described in U.S. Pat. Nos. 5,639,606, 5,643,765, and 5,876,978 (each of which is herein incorporated by reference) is utilized.

[0203] B. Detection of Protein

[0204] In other embodiments, gene expression of oncogenes is detected by measuring the expression of the corresponding protein or polypeptide. In some embodiments, protein expression is detected in a tissue sample. In other embodiments, protein expression is detected in bodily fluids. In some embodiments, the level of protein expression is quantitated. Protein expression may be detected by any suitable method. In some embodiments, proteins are detected by their binding to an antibody raised against the protein. The generation of antibodies is well known to those skilled in the art.

[0205] Antibody binding is detected by techniques known in the art (e.g., radioimmunoassay, ELISA (enzyme-linked immunosorbant assay), “sandwich” immunoassays, immunoradiometric assays, gel diffusion precipitation reactions, immunodiffusion assays, in situ immunoassays (e.g., using colloidal gold, enzyme or radioisotope labels, for example), Western blots, precipitation reactions, agglutination assays (e.g., gel agglutination assays, hemagglutination assays, etc.), complement fixation assays, immunofluorescence assays, protein A assays, and immunoelectrophoresis assays, etc.

[0206] In one embodiment, antibody binding is detected by detecting a label on the primary antibody. In another embodiment, the primary antibody is detected by detecting binding of a secondary antibody or reagent to the primary antibody. In a further embodiment, the secondary antibody is labeled. Many methods are known in the art for detecting binding in an immunoassay and are within the scope of the present invention.

[0207] In some embodiments, an automated detection assay is utilized. Methods for the automation of immunoassays include those described in U.S. Pat. Nos. 5,885,530, 4,981,785, 6,159,750, and 5,358,691, each of which is herein incorporated by reference. In some embodiments, the analysis and presentation of results is also automated. For example, in some embodiments, software that generates an expression profile based on the presence or absence of a series of proteins corresponding to oncogenes is utilized.

[0208] In other embodiments, the immunoassay described in U.S. Pat. Nos. 5,599,677 and 5,672,480; each of which is herein incorporated by reference.

### EXPERIMENTAL

[0209] The following examples are provided in order to demonstrate and further illustrate certain preferred embodiments and aspects of the present invention and are not to be construed as limiting the scope thereof.

[0210] In the experimental disclosure which follows, the following abbreviations apply: N (normal); M (molar); mM (millimolar); μM (micromolar); mol (moles); mmol (millimoles); μmol (micromoles); nmol (nanomoles); pmol (picomoles); g (grams); mg (milligrams); μg (micrograms); ng (nanograms); l or L (liters); ml (milliliters); μl (microliters); cm (centimeters); mm (millimeters); μm (micrometers); nm (nanometers); and ° C. (degrees Centigrade).

### Example 1

Materials and Methods

[0211] This Example describes experimental methods utilized in the below examples.

A. Cell Lines

[0212] Cell lines used in experiments of the present invention are described below.

MDA-MB-231

[0213] Tissue: adenocarcinoma; mammary gland; breast; pleural effusion
[0214] Tumorigenic: forms adenocarcinoma grade III
[0215] Receptors expressed: Epidermal Growth Factor (EGF) and Transforming growth factor (TGF-alpha)
[0216] Oncogene: wnt3+ and wnt7h+
   References:
[0217] Siciliano M J, Barker P E, Cailleau R. Mutually exclusive genetic signatures of human breast tumor cell lines with a common chromosomal marker. Cancer Res. March 1979;39(3):919-22.
[0218] Calleau R, Olive M, Cruciger Q V. Long-term human breast carcinoma cell lines of metastatic origin: preliminary characterization. In vitro. November 1978;14(11):911-5.
[0219] Cruciger Q V, Pathak S, Calleau R. Human breast carcinomas: marker chromosomes involving 1q in seven cases. Cytogenet Cell Genet. 1976; 17(4):231-5.
[0220] Satya-Prakash K L, Pathak S, Hsu T C, Olive M, Cailleau R. Cytogenetic analysis on eight human breast tumor cell lines: high frequencies of 1q, 11q and HeLa-like marker chromosomes. Cancer Genet Cytogenet January 1981;3(1):61-73
   MCF7
[0221] Tissue: adenocarcinoma, mammary gland, breast
[0222] Metastatic site: pleural effusion
[0223] Receptors: estrogen receptor+
[0224] Oncogenes: wnt7h+
[0225] This cell line is also known to moderately express c-erbB-2 and overexpress c-myc oncogene
[0226] Cellular product: Insulin like growth factor binding protein (IGFBP)
   References:
[0227] Soule H D et al. Ahuman cell line from a pleural effusion derived from a breast carcinoma. J. Natl. Cancer Inst. 51: 1409-1416, 1973
[0228] Landers J E et al. Translational enhancement of mdm2 oncogene expression in human tumor cells containing a stabilized wild-type p53 protein. Cancer Res. 57: 3562-3568, 1997
[0229] Bacus S S et al. Differentiation of cultured human cancer cells (AU-565 and MCF7) associated with loss of cell surface HER-2/neu oligonucleotide. Mol. Carcinog. 3: 350-362, 1990
   MCF10CA1
[0230] MCF10 cells are derived from benign breast tissue from a woman with fibrocystic disease. MCF 10 lines consists of several lines, one is MCF10A, an immortalized normal human breast cell line. MCF10A was transformed with T24 Ha-ras to make MCF10AneoT cells. MCF10AT with neoplastic progression potential was derived from xenograft passaged MCF10-AneoT. MCF10AT generates carcinoma in about 25% of xenografts. Fully malignant MCF10CA1 lines were derived from several xenograft passages of MCF10AT. MCF10CA1a forms tumors 100% of the time and it metastasizes. A kariotype of MCF10CA1a shows an extra copy of chromosome 1. It metastasizes into the lung 36 days after IV injection of the cells.
   References:
[0231] Santner S J et al. Malignant MCF10CA1 cell lines derived from premalignant human breast epithelial MCF10AT cells. Breast Cancer Research and treatment 65: 101-110, 2001.
   MYC-MT-1
[0232] A female MMTV-C-MYC transgenic mouse developed a mammary tumor. The tumor was isolated and a small fresh tissue is put into culture with a medium conditioned by Dr. Jushoa Liao at Karmanos Cancer Institute. This tumor cell line was established after 10 passages.
   NMuMG
[0233] Tissue: Mouse normal mammary gland, epithelial
[0234] Strain: NAMRU, female
[0235] Tumorigenic: produce benign tumor in mice
   References:
[0236] Owens R B. Glandular epithelial cells from mice: a method for selective cultivation. J. Natl. Cancer Inst. 52: 1375-1378, 1974
[0237] Owens R B et al. Epithelial cell cultures from normal glandular tissue of mice. J. Natl. Cancer Inst. 53: 261-269, 1974
[0238] Yingling J M et al. Mammalian dwarfins are phosphorylated in response to transforming growth factor beta and are implicated in control of cell growth. Proc. Natl. Acad. Sci. USA 93: 8940-8944, 1996
   BxPC-3
[0239] Tissue: adenocarcinoma, pancreas
[0240] Cellular product: mucin, pancreatic cancer specific antigen; CEA, carcinoma embryonic antigen.
[0241] Source: 61 year old female
[0242] Tumorigenic: yes
[0243] Oncogenes: c-Ki-ras
   References:
[0244] Tan M H et al. Characterization of a new primary human pancreatic tumor line. Cancer Invest. 4: 15-23, 1986
[0245] Loor R et al. Use of pancreas-specific antigen in immunodiagnosis of pancreatic cancer. Clin. Lab. Med. 2: 567-578, 1982
[0246] Lan M S et al. Polypeptide core of a human pancreatic tumor mucin antigen. Cancer Res. 50: 2997-3001, 1990
[0247] Chambers J A and Harris A. Expression of the cystic fibrosis gene and the major pancreatic mucin gene, MUC1, in human ductal epithelial cells. J. Cell Sci. 105: 417-422, 1993
   T-47D
[0248] Tissue: ductal carcinoma, mammary gland, breast, duct
[0249] Metastatic site: pleural effusion
[0250] Source: pleural effusion of a 54 years old female with infiltrating ductal carcinoma of the breast
[0251] Receptor expression: estrogen, androgen, calcitonin, progesteron, glucocorticoid and prolactin positive.
[0252] Oncogenes: wnt3+ and wnt7h+
[0253] This cell line is also know to overexpress c-erbB-2
   References:
[0254] Keydar I et al., Establishment and characterization of a cell line of human breast carcinoma origin. Eur. J. Cancer 15: 659-670, 1979
[0255] Judge S M and Chatterton R T Jr. Progesterone-specific stimulation of triglyceride biosynthesis in a breast cancer cell line (T-47D). Cancer Res. 43: 4407-4412, 1983
[0256] Lamp S J et al. Calcitonin induction of a persistent activated state of adenylate cyclase in human breast cancer cells (T-47D). J. Biol. Chem. 256: 12269-12274, 1981
[0257] Sher E et al. Whole-cell uptake and nuclear localization of 1,25-dihydroxy-cholecalciferol by breast cancer cells (T-47D) in culture. Biochem. J. 200: 315-320, 1981
[0258] Freake H C et al. 1,25-Dihydroxyvitamin D3 specifically binds to a human breast cancer cell line (T-47D) and stimulates growth. Biochem. Biophys. Res. Commun. 101: 1131-1138, 1981
[0259] Faust J B and Meeker T C. Amplification and expression of the bcl-1 gene in human solid tumor cell lines. Cancer Res. 52: 2460-2463, 1992 RF33514:
[0260] Huguet E L et al. Differential expression of human Wnt genes 2, 3, 4, and 7B in human breast cell lines and normal and disease states of human breast tissue. Cancer Res. 54: 2615-2621, 1994
   BT-474
[0261] Tissue: ductal carcinoma, mammary gland, breast
[0262] Source: 60 year old female
[0263] Oncogene: c-erbB-2
   References:
[0264] Lasfargues E Y et al. Isolation of two human tumor epithelial cell lines from solid breast carcinomas. J. Natl. Cancer Inst. 61: 967-978, 1978
[0265] Lasfargues E Y et al. A human breast tumor cell line (BT-474) that supports mouse mammary tumor virus replication. In vitro 15: 723-729, 1979
[0266] Littlewood-Evans A J et al. The osteoclast-associated protease cathepsin K is expressed in human breast carcinoma. Cancer Res. 57: 5386-5390, 1997
   WSU-FSCCL
[0267] Human B-cell line established in 1993
[0268] Source: from peripheral blood of a male patient with low grade follicular small cleaved cell lymphoma in leukemic phase.
[0269] Oncogenes: exhibiting chromosomal translocation for both c-myc and bcl-2
   Reference:
[0270] Mohammad R M, Mohamed A N, Smith M R, Jawadi N S, AL-Khatib A. A unique EBV-Negative Low Grade Lymphoma Line (WSU-FSCCL) Exhibiting both t(14;18) and t(8;11). Cancer Genet Cytogenet 70:62-67, 1993
   B. Cell Culture

[0271] Human breast cancer cells, MCF7, MCF10CA1a, MDA-MB 231, MDA-MB 435.eB, and human normal breast cells, MCF10A were all obtained from Karmanos Cancer Institute. All cells were cultured in DMEM/F12 media (Gibco, Md.) supplemented with 10 mM HEPES, 29 mM sodium bicarbonate, penicillin (100 units/ml) and streptomycin (100 μg/ml). In addition, 10% calf serum, 10 μg/ml insulin (Sigma Chemical, St Louis, Mo), and 0.5 nM estradiol was used in MCF7 media. 5% horse serum and insulin (10 μg/ml) was used for MCF10Cala, and 10% fetal calf serum was used for MDA-MB 231 and 435 lines. MCF 1.0A culture was supplemented with 5% horse serum, insulin. (10 μg/ml), 100 ng/ml cholera enterotoxin (Calbiochem, Calif.), 0.5 μg/ml hydrocortisone (Sigma Chemical) and 20 ng/ml epidermal growth factor (Sigma Chemical). All flasks and plates were incubated in a humidified atmosphere of 95% air and 5% CO₂ at 37° C.

[0272] MYC-MT-1 cells were also cultured in DMEM/F12 media containing 10 ng/ml EGF (epithelial growth factor), 1 nM estradiol, 10 μg/ml insulin and 10% FBS (fetal bovine serum). BxPC-3 pancreatic carcinoma cell line and BT-474, breast tumor cell line were cultured in RPMI 1640 with 10% FBS. Breast tumor cell line, T-47D was cultured in the same media as BT-474 with the addition of 2.5 μg/ml insulin. NMuMG (normal mouse mammary gland cells) cell line was grown in DMEM media with 4.5 g/l glucose, 10 μg/ml insulin and 10% FBS.

[0273] All the above cells were seeded at 2500 to 5,000 cells/well in 96 well plates. The cells were treated with oligonucleotide compounds in fresh media (100 μl total volume) 24 hours after seeding. The media was replaced with fresh media without oligonucleotides 24 hours after treatment and every 48 hours for 6 to 7 days or until the control cells were 80 to 100% confluent. The inhibitory effect of oligonucleotide was evaluated using an MTT staining technique.

[0274] Human follicular lymphoma cell line, WSU-FSCCL was used to evaluate the effect of antic-myc oligonucleotides as well as anti-Bcl-2 oligonucleotides. FSCCL cells grow as a single cell suspension in tissue culture. The culture was maintained in RPMI 1640 supplemented with 10% fetal bovine serum, 1% L-glutamine, 100 units/ml penicillin and 1.00 μg/ml streptomycin. FSCCL cells were treated in 24 well plates (2×10⁵ cells/well/ml) with oligonucleotide compounds and incubated in a humidified atmosphere of 95% air and 5% C0₂ at 37° C. The cells were counted every 24 hours using a hemocytometer.

C. Oligonucleotide Preparation

[0275] All oligonucleotides were synthesized, gel purified anal lyophilized by BIOSYNTHESIS (Lewisville, Tex.) or Qiagen (Valencia, Calif.). Methylated oligonucleotides were methylated at all CpG sites. Methylated Oligonucleotides were dissolved in pure sterile water (Gibco, Invitrogen Corporation) and used to treat cells in culture.

D. Lipofectin Encapsulation

[0276] 20 μg lipofectin (Invitrogen) and 16 μg oligonucleotides were each incubated with 200 μl Opti-MEM (Invitrogen) media in separate sterile tubes at room temperature for 45 min. They were then combined and incubated for an additional 15 min. 1.6 ml Opti-MEM media was then added to a final volume of 2 ml and a final concentration 1 μM oligonucleotide. The concentration of lipofectin and oligonucleotides can be adjusted based on their molecular weight and desired concentration of compounds. There was no cytotoxic effect at this level.

E. Cell Growth Inhibition Assay

[0277] Cell growth inhibition was assessed using 3-[4,5-Dimethyl-thiazol-2-yl]-2,5diphenyltetrazolium bromide (MTT) purchased from Sigma Chemical (St. Louis, Mo.). Cells were resuspended in culture media at 50,000 cells /ml and 100 μl was distributed into each well of a 96-well, flat bottomed plate (Costar Corning, N.Y., USA) and incubated for 24 hours. Media was changed to 100 μl fresh media containing the desired concentration of oligonucleotides and incubated for 24 hours. Controls had media with pure sterile water equal to the volume of oligonucleotide solution. The media was changed without further addition of oligonucleotides every 24 hours until the control cultures were confluent (6 to 7 days). Thereafter the media was removed and plates were washed two times with phosphate-buffered saline (PBS) and 100 μl of serum free media containing 0.5 mg/ml MTT dye was added into each well and incubated for 1 hour at 37° C. The media with dye was removed, washed with PBS and 100 μl of dimethyl sulfoxide (DMSO) was added to solubilize the reactive dye. The absorbance values were read using an automatic multiwell spectrophotometer (Bio-Tek Microplate Autoreader, Winooski, Vt., USA). Each treatment was repeated at least 3 times with 8 independent wells each time.

F. Protein Extraction and Western Blot Analysis

[0278] The cells were seeded and cultured in T25 tissue culture flasks (Costar, Corning, N.Y., USA) at 200,000 cells/flask. The cells were allowed to attach for 24 hours. The media was replaced with fresh media containing 10 to 20 μM oligonucleotides and incubated for 24 hours. The media was changed every 48 hours without further addition of inhibitors and cell cultures were continued until the control flasks were confluent (6-7 days). Cells were harvested using 1× trypsin:EDTA (Invitrogen, Gibco, Md.) and collected by centrifugation at 2000 rpm for 5 min. Cells were resuspended in 125 mM Tris-HCL buffer (pH 6.8), sonicated with 10-20% output and lysed in an equal volume of 8% SDS for a final concentration of 4% SDS. Cells extracts were boiled for 10 min, chilled on ice and centrifuged at 2,000 rpm for 5 min before collecting the supernatant. The protein was quantitated using BCA protein assay kit (Pierce, Rockford, Ill.). 50 to 100 μg of proteins were subjected to 10 to 15% gel (depending on molecular weight of each protein) electrophoresis and transferred to nitrocellulose membrane (Schleicher & Schuell, Kence, N.H.). Each membrane was blocked with 10% dry milk in TBSTe (Tris buffered saline, Tween 20) for 2 hr, prior to incubation with primary antibodies in TBST overnight. Antibodies to human c-myc, c-ha-ras and erbB-2 were mice IgG (Pharmingen San Diego, Calif.). Membranes were washed 3 times, 15 min each in TBST, then incubated with secondary antibodies conjugated with peroxidase for 1 hr. The membranes were washed 5 times, 10 min each in TBST and incubated with 2 ml each of Lumino/Enhancer and Stable peroxide solution (PIERCE) for 1 min. The membranes were exposed to X-ray film for 2 min (exposure time is adjusted from 10 seconds up to 24 hr if necessary).

### Example 2

c-ki-RAS

[0279] This example describes the ability of oligonucleotide compounds targeted against the promoter of the c-ki-Ras gene to inhibit the growth of cancer cell lines. Experiments were performed as described in Example 1. The results are shown in FIGS. 13 and 19. The sequences of the oligonucleotides targeted against c-ki-Ras as well as the sequence of c-ki-Ras gene are shown in FIGS. 5 and 6.

### Example 3

Bcl-2

[0280] This example describes the ability of oligonucleotide compounds targeted against the promoter of the bcl-2 gene to inhibit the growth of cancer cell lines. Experiments were performed as described in Example 1. The results are shown in FIGS. 14 and 20. The sequences of the oligonucleotides targeted against bcl-2 as well as the sequence of bcl-2 gene are shown in FIGS. 1 and 2.

### Example 4

c-ha-RAS

[0281] This example describes the ability of oligonucleotide compounds targeted against the promoter of the c-ha-Ras gene to inhibit the growth of cancer cell lines. Experiments were performed as described in Example 1. The results are shown in FIGS. 16 and 22. The sequences of the oligonucleotides targeted against c-ha-Ras as well as the sequence of c-ha-Ras gene are shown in FIGS. 7 and 8.

### Example 5

c-erbB-2

[0282] This example describes the ability of oligonucleotide compounds targeted against the promoter of the c-erbB-2 gene to inhibit the growth of cancer cell lines. Experiments were performed as described in Example 1. The results are shown in FIGS. 15 and 21. The sequences of the oligonucleotides targeted against c-erbB-2 as well as the sequence of c-erbB-2 gene are shown in FIGS. 3 and 4.

### Example 6

c-myc

[0283] This example describes the ability of oligonucleotide compounds targeted against the promoter of the c-myc gene to inhibit the growth of cancer cell lines. Experiments were performed as described in Example 1. The results are shown in FIGS. 17 and 23. The sequences of the oligonucleotides targeted against c-myc as well as the sequence of c-myc gene are shown in FIGS. 9 and 10.

### Example 7

TGF-α

[0284] This example describes the ability of oligonucleotide compounds targeted against the promoter of the TGF-α gene to inhibit the growth of cancer cell lines. Experiments were performed as described in Example 1. The results are shown in FIGS. 18 and 24. The sequences of the oligonucleotides targeted against TGF-α as well as the sequence of TGF-α gene are shown in FIGS. 11 and 12.

### Example 8

Inhibition of Cell Growth by Non-Methylated Oligonucleotides

[0285] This example describes the inhibition of growth of lymphoma cell lines by non-methylated oligonucleotides targeted towards Bcl-2. WSU-FSCCL cells were plated in 24 well plates at 2×10⁵ cells /well at t=−24 hr. For each time point to be harvested, triplicate wells were treated at t=0 with the oligos at the concentrations indicated. Controls were plated in triplicate. Plates were incubated at 37° C. All cultures were monitored through out the experiment by cell count and viability every 24 hr for 4 days using trypan blue stain and hemacytometer.

[0286] The MABL2 oligonucleotide is targeted to the promoter region of Bcl-2 [5′-CAX GCA XGX GCA TCC CXG CCX GTG-3′]. Pho-Mabl-2 is an unmethylated version of MABL-2 [5′-CAC GCA CGC GCA TCC CCG CCC GTG-3′]. WSU-FSCCL—derived from human B cell lymphoma (low-grade follicular small-cleaved cell lymphoma). The experimental protocol is shown in Table 2.

TABLE 2

| | Target | | | | | | Viability | Harvest |
|---|---|---|---|---|---|---|---|---|
| Group | Gene | Compound | Cells | Conc. | | Formulation | Assay | for Methyl |
| 1 | Bcl-2 | MABL2 | FSCCL | 10 | uM | none | n = 3 @ 24, | n = 3 @ 72 hr |
| | | | | | | | 48 & 72 hr | |
| 2 | Bcl-2 | MABL2 | FSCCL | 3 | uM | none | n = 3 @ 24, | n = 3 @ 72 hr |
| | | | | | | | 48 & 72 hr | |
| 3 | Bcl-2 | PhoMABL2 | FSCCL | 10 | uM | none | n = 3 @ 24, | n = 3 @ 72 hr |
| | | | | | | | 48 & 72 hr | |

| | | | | | | | |
|---|---|---|---|---|---|---|---|
| 4 | none | none | FSCCL | n/a | none | n = 3 @ 24, | n = 3 @ 72 hr |
| | | | | | | 48 & 72 hr | |

[0287] The results are shown in FIG. 31. The results demonstrate that the unmethylated oligonucleotide directed against Bcl-2 is as effective as the methylated oligonucleotide in inhibiting cell growth.

[0288] All publications and patents mentioned in the above specification are herein incorporated by reference. Various modifications and variations of the described method and system of the invention will be apparent to those skilled in the art without departing from the scope and spirit of the invention. Although the invention has been described in connection with specific preferred embodiments, it should be understood that the invention as claimed should not be unduly limited to such specific embodiments. Indeed, various modifications of the described modes for carrying out the invention that are obvious to those skilled in the relevant fields are intended to be within the scope of the following claims.

The application's sequence listing, which the Patent Office published only in electronic form, follows.

SEQUENCE LISTING (1439 sequences)

SEQ ID NO: 1 - DNA, 1394 bp, Homo sapiens
ctcgagccctattaagtaagccgctgtgcttctagaagacctttttcttttcttggtgctttttgtcaaagactcttggagataaaaatacacacgtgcaacttgtttgtcctcttgtccttttttgctaggggctattcatgctgattaatttaaaactgtctgcttgcgcgtacacacgtctgcgagtgtgaatgtgtatgtgtgtatctatgtacctcatttgagaaagtgcggccaactaggattggctacgaggcaaaggtggagacctttaggagcccacccaccccagcgttaggacggtgggcctgaaagttactatatggaagtcctcatcgtgtagcactaaaccagtgtaaaaggtgttagggacagagggaaaacattgacttaaactgtcgtaaagcccttgataaacccctttccctggagctgctgagttctgcatggcctgggcacggactaggtgttcaggtggacacgggcggggatgcgcgtgcgtgtgtagtgcgcggacacctaggaagctacttgaaagtaaacaccacgctcggggcgtccctagacattgcttaaaacgtgcagagtcacctgtcttcacagcagggcagcgctgaggtctcactgctgggggcggtggggggcggcattggcctgggtcttccgcgcgccgagcgccggtaacacaacgtgtgtgtgtgtagcgcgtgtacacactctcatacacggctagaaagggtccaggcgacacacacactcccacatacacggccagaaaaggtccaggcgagacacacacacacacacacacacacacactccacacacactcacacggccagaaagggtccaggcggttggcggcgcttttccagcccttccgcccggcccggcgcgtcttttcatggcgcaccctcccgccagccgcccccctccgcactccgtcgtgcgattccccgggagcccccaccccgtcgcggaccccagcgaccaccaagtcgcaccggcctccgcaggcctgagcagaaggccccgcgcacacccacgcgcggggcccgcggggaggcctgtgccgcccgcgccacccactggccgggccccgcgggcgcagcggagcgggcgggtggccggcccggaggcgccctccccggcccggccccgcgcgccatgtgcccccggcgggacggccactcccgggcctgccgcggcgcctttaacccgggccagggagcggggcggagggggcggtcggggtggctcagaggagggctctttctttcttctttttttgaatgaaccgtgtgacgttacgcacaggaaaccggtcgggctgtgcagagaatgaagtaagaggacaggcaccacagccccgctcccgcccccttcctccc

SEQ ID NO: 2 - DNA, 23 bp, Artificial Sequence
  Synthetic
  modified_base (4)..(4): methylated C nucleotide
  modified_base (10)..(10): methylated C nucleotide
  modified_base (18)..(18): methylated C nucleotide
  modified_base (20)..(20): methylated C nucleotide
actcgcagacgtgtgtacgcgca

SEQ ID NO: 3 - DNA, 24 bp, Artificial Sequence
  Synthetic
  modified_base (3)..(3): methylated C nucleotide
  modified_base (7)..(7): methylated C nucleotide
  modified_base (9)..(9): methylated C nucleotide
  modified_base (17)..(17): methylated C nucleotide
  modified_base (21)..(21): methylated C nucleotide
cacgcacgcgcatccccgcccgtg

SEQ ID NO: 4 - DNA, 20 bp, Artificial Sequence
  Synthetic
  modified_base (3)..(3): methylated C nucleotide
  modified_base (6)..(6): methylated C nucleotide
  modified_base (10)..(10): methylated C nucleotide
  modified_base (13)..(13): methylated C nucleotide
  modified_base (15)..(15): methylated C nucleotide
  modified_base (17)..(17): methylated C nucleotide
accggcgctcggcgcgcgga

SEQ ID NO: 5 - DNA, 20 bp, Artificial Sequence
  Synthetic
  modified_base (3)..(3): methylated C nucleotide
  modified_base (5)..(5): methylated C nucleotide
  modified_base (8)..(8): methylated C nucleotide
  modified_base (13)..(13): methylated C nucleotide
  modified_base (17)..(17): methylated C nucleotide
gacgcgccgggccgggcgga

SEQ ID NO: 6 - DNA, 22 bp, Artificial Sequence
  Synthetic
  modified_base (3)..(3): methylated C nucleotide
  modified_base (5)..(5): methylated C nucleotide
  modified_base (7)..(7): methylated C nucleotide
  modified_base (17)..(17): methylated C nucleotide
  modified_base (19)..(19): methylated C nucleotide
cccgcgcgtgggtgtgcgcggg

SEQ ID NO: 7 - DNA, 26 bp, Artificial Sequence
  Synthetic
  modified_base (3)..(3): methylated C nucleotide
  modified_base (7)..(7): methylated C nucleotide
  modified_base (12)..(12): methylated C nucleotide
  modified_base (17)..(17): methylated C nucleotide
  modified_base (21)..(21): methylated C nucleotide
  modified_base (23)..(23): methylated C nucleotide
cccgcccgctccgctgcgcccgcggg

SEQ ID NO: 8 - DNA, 21 bp, Artificial Sequence
  Synthetic
  modified_base (3)..(3): methylated C nucleotide
  modified_base (5)..(5): methylated C nucleotide
  modified_base (7)..(7): methylated C nucleotide
  modified_base (13)..(13): methylated C nucleotide
  modified_base (18)..(18): methylated C nucleotide
ggcgcgcggggccgggccggg

SEQ ID NO: 9 - DNA, 27 bp, Artificial Sequence
  Synthetic
  modified_base (7)..(7): methylated C nucleotide
  modified_base (9)..(9): methylated C nucleotide
  modified_base (11)..(11): methylated C nucleotide
  modified_base (17)..(17): methylated C nucleotide
  modified_base (22)..(22): methylated C nucleotide
acatggcgcgcggggccgggccgggga

SEQ ID NO: 10 - DNA, 24 bp, Artificial Sequence
  Synthetic
gcggcttacttaatagggctcgag

SEQ ID NO: 11 - DNA, 28 bp, Artificial Sequence
  Synthetic
cctcgtagccaatcctagttggccgcac

SEQ ID NO: 12 - DNA, 24 bp, Artificial Sequence
  Synthetic
caggcccaccgtcctaacgctggg

SEQ ID NO: 13 - DNA, 25 bp, Artificial Sequence
  Synthetic
gtctagggacgccccgagcgtggtg

SEQ ID NO: 14 - DNA, 36 bp, Artificial Sequence
  Synthetic
cgccccccaccgcccccagcagtgagacctcagcgc

SEQ ID NO: 15 - DNA, 26 bp, Artificial Sequence
  Synthetic
ccgtgtatgagagtgtgtacacgcgc

SEQ ID NO: 16 - DNA, 32 bp, Artificial Sequence
  Synthetic
gcgccgccaaccgcctggaccctttctggccg

SEQ ID NO: 17 - DNA, 34 bp, Artificial Sequence
  Synthetic
cgcacgacggagtgcggaggggggcggctggcgg

SEQ ID NO: 18 - DNA, 23 bp, Artificial Sequence
  Synthetic
ccgcgacggggtgggggctcccg

SEQ ID NO: 19 - DNA, 23 bp, Artificial Sequence
  Synthetic
ccgcgacggggtgggggctcccg

SEQ ID NO: 20 - DNA, 42 bp, Artificial Sequence
  Synthetic
cggccagtgggtggcgcgggcggcacaggcctccccgcgggc

SEQ ID NO: 21 - DNA, 35 bp, Artificial Sequence
  Synthetic
gcgccgcggcaggcccgggagtggccgtcccgccg

SEQ ID NO: 22 - DNA, 36 bp, Artificial Sequence
  Synthetic
accccgaccgccccctccgccccgctccctggcccg

SEQ ID NO: 23 - DNA, 34 bp, Artificial Sequence
  Synthetic
gcccgaccggtttcctgtgcgtaacgtcacacgg

SEQ ID NO: 24 - DNA, 30 bp, Artificial Sequence
  Synthetic
ggacaagaggacaaacaagttgcacgtgtg

SEQ ID NO: 25 - DNA, 30 bp, Artificial Sequence
  Synthetic
ctggtttagtgctacacgatgaggacttcc

SEQ ID NO: 26 - DNA, 32 bp, Artificial Sequence
  Synthetic
cagggaaaggggtttatcaagggctttacgac

SEQ ID NO: 27 - DNA, 29 bp, Artificial Sequence
  Synthetic
cacctgaacacctagtccgtgcccaggcc

SEQ ID NO: 28 - DNA, 19 bp, Artificial Sequence
  Synthetic
gagggcgcctccgggccgg

SEQ ID NO: 29 - DNA, 539 bp, Homo sapiens
cccgggggtcctggaagccacaaggtaaacacaacacatccccctccttgactatcaattttactagaggatgtggtgggaaaaccattatttgatattaaaacaaataggcttgggatggagtaggatgcaagctcccaggaaagtttaagataaaacctgagacttaaaagggtgttaagagtggcagcctagggaatttatcccggactccgggggagggggcagagtcaccagcctctgcatttagggattctccgaggaaaagtgtgagaacggctgcaggcaacccagcttcccggcgctaggagggacgcacccaggcctgcgcgaagagagggagaaagtgaagctgggagttgccactcccagacttgttggaatgcagttggagggggcgagctgggagcgcgcttgctcccaatcacaggagaaggaggaggtggaggaggagggctgcttgaggaagtataagaatgaagttgtgaagctgagattcccctccattgggaccggagaaaccagggagcccccccggg

SEQ ID NO: 30 - DNA, 24 bp, Artificial Sequence
  Synthetic
  modified_base (4)..(4): methylated C nucleotide
  modified_base (6)..(6): methylated C nucleotide
  modified_base (17)..(17): methylated C nucleotide
aagcgcgctcccagctcgccccct

SEQ ID NO: 31 - DNA, 25 bp, Artificial Sequence
  Synthetic
  modified_base (7)..(7): methylated C nucleotide
  modified_base (19)..(19): methylated C nucleotide
  modified_base (22)..(22): methylated C nucleotide
tgggtgcgtccctcctagcgccggg

SEQ ID NO: 32 - DNA, 26 bp, Artificial Sequence
  Synthetic
  modified_base (3)..(3): methylated C nucleotide
  modified_base (6)..(6): methylated C nucleotide
  modified_base (20)..(20): methylated C nucleotide
ttcgccgcaggcctgggtgcgtccct

SEQ ID NO: 33 - DNA, 33 bp, Artificial Sequence
  Synthetic
  modified_base (1)..(1): methylated C nucleotide
  modified_base (3)..(3): methylated C nucleotide
  modified_base (17)..(17): methylated C nucleotide
  modified_base (29)..(29): methylated C nucleotide
  modified_base (32)..(32): methylated C nucleotide
cgcgcaggcctgggtgcgtccctcctagcgccg

SEQ ID NO: 34 - DNA, 25 bp, Artificial Sequence
  Synthetic
  modified_base (4)..(4): methylated C nucleotide
  modified_base (22)..(22): methylated C nucleotide
agccgttctcacacttttcctcgga

SEQ ID NO: 35 - DNA, 24 bp, Artificial Sequence
  Synthetic
  modified_base (13)..(13): methylated C nucleotide
  modified_base (20)..(20): methylated C nucleotide
tgccccctcccccggagtccggga

SEQ ID NO: 36 - DNA, 33 bp, Artificial Sequence
  Synthetic
  modified_base (13)..(13): methylated C nucleotide
  modified_base (15)..(15): methylated C nucleotide
  modified_base (26)..(26): methylated C nucleotide
attgggagcaagcgcgctcccagctcgccccct

SEQ ID NO: 37 - DNA, 35 bp, Artificial Sequence
  Synthetic
  modified_base (2)..(2): methylated C nucleotide
  modified_base (4)..(4): methylated C nucleotide
  modified_base (18)..(18): methylated C nucleotide
  modified_base (30)..(30): methylated C nucleotide
  modified_base (33)..(33): methylated C nucleotide
tcgcgcaggcctgggtgcgtccctcctagcgccgg

SEQ ID NO: 38 - DNA, 34 bp, Artificial Sequence
  Synthetic
  modified_base (2)..(2): methylated C nucleotide
  modified_base (4)..(4): methylated C nucleotide
  modified_base (17)..(17): methylated C nucleotide
  modified_base (29)..(29): methylated C nucleotide
  modified_base (32)..(32): methylated C nucleotide
tcgcgcaggcctgggtcgtccctcctagcgccgg

SEQ ID NO: 39 - DNA, 21 bp, Artificial Sequence
  Synthetic
gtggcttccaggacccccggg

SEQ ID NO: 40 - DNA, 24 bp, Artificial Sequence
  Synthetic
  modified_base (13)..(13): methylated C nucleotide
  modified_base (20)..(20): methylated C nucleotide
tgccccctcccccggagtccggga

SEQ ID NO: 41 - DNA, 33 bp, Artificial Sequence; identical to SEQ ID NO: 36
  Synthetic
  modified_base (13)..(13): methylated C nucleotide
  modified_base (15)..(15): methylated C nucleotide
  modified_base (26)..(26): methylated C nucleotide

SEQ ID NO: 42 - DNA, 35 bp, Artificial Sequence; identical to SEQ ID NO: 37
  Synthetic
  modified_base (2)..(2): methylated C nucleotide
  modified_base (4)..(4): methylated C nucleotide
  modified_base (18)..(18): methylated C nucleotide
  modified_base (30)..(30): methylated C nucleotide
  modified_base (33)..(33): methylated C nucleotide

SEQ ID NO: 43 - DNA, 34 bp, Artificial Sequence; identical to SEQ ID NO: 38
  Synthetic
  modified_base (2)..(2): methylated C nucleotide
  modified_base (4)..(4): methylated C nucleotide
  modified_base (17)..(17): methylated C nucleotide
  modified_base (29)..(29): methylated C nucleotide
  modified_base (32)..(32): methylated C nucleotide

SEQ ID NO: 44 - DNA, 19 bp, Artificial Sequence
  Synthetic
  modified_base (2)..(2): methylated C nucleotide
  modified_base (14)..(14): methylated C nucleotide
  modified_base (17)..(17): methylated C nucleotide
gcgtccctcctagcgccgg

SEQ ID NO: 45 - DNA, 29 bp, Artificial Sequence
  Synthetic
cccgggggggctccctggtttctccggtc

SEQ ID NO: 46 - DNA, 718 bp, Homo sapiens
cctgagggtggcggggtgctcttcgcagcttctctgtggagaccggtcagcggggcggcgtggccgctcgcggcgtctccctgtggcatccgcacagcccgccgcggtccggtcccgctccgggtcagaattggcggctgcggggacagccttgcggctaggcagggggcgggccgccgcgtgggtccggcagtccctcctcccgccaaggcgccgcccagacccgctctccagccggcccggctcgccaccctagaccgccccagccaccccttcctccgccggcccggcccccgctcctcccccgccggcccggcccggccccctccttctccccgccggcgctcgctgcctccccctcttccctcttcccacaccgccctcagccgctccctctcgtacgcccgtctgaagaagaatcgagcgcggaacgcatcgatagctctgccctctgcggccgcccggccccgaactcatcggtgtgctcggagctcgattttcctaggcggcggccgcggcggcggaggcagcagcggcggcggcagtggcggcggcgaaggtggcggcggctcggccagtactcccggcccccgccatttcggactgggagcgagcgcggcgcaggcactgaaggcggcggcggggccagaggctcagcggctcccaggtgcgggagagaggtacggagcggaccacccctcctgggcccctgcccggg

SEQ ID NO: 47 - DNA, 23 bp, Artificial Sequence
  Synthetic
  modified_base (3)..(3): methylated C nucleotide
  modified_base (8)..(8): methylated C nucleotide
  modified_base (14)..(14): methylated C nucleotide
  modified_base (19)..(19): methylated C nucleotide
  modified_base (21)..(21): methylated C nucleotide
cccggagcgggaccggaccgcgg

SEQ ID NO: 48 - DNA, 24 bp, Artificial Sequence
  Synthetic
  modified_base (3)..(3): methylated C nucleotide
  modified_base (11)..(11): methylated C nucleotide
  modified_base (13)..(13): methylated C nucleotide
  modified_base (16)..(16): methylated C nucleotide
  modified_base (21)..(21): methylated C nucleotide
gccggacccacgcggcggcccgcc

SEQ ID NO: 49 - DNA, 23 bp, Artificial Sequence
  Synthetic
  modified_base (5)..(5): methylated C nucleotide
  modified_base (8)..(8): methylated C nucleotide
  modified_base (11)..(11): methylated C nucleotide
  modified_base (13)..(13): methylated C nucleotide
  modified_base (17)..(17): methylated C nucleotide
  modified_base (20)..(20): methylated C nucleotide
cctccgccgccgcggccgccgcc

SEQ ID NO: 50 - DNA, 27 bp, Artificial Sequence
  Synthetic
  modified_base (3)..(3): methylated C nucleotide
  modified_base (6)..(6): methylated C nucleotide
  modified_base (9)..(9): methylated C nucleotide
  modified_base (18)..(18): methylated C nucleotide
  modified_base (21)..(21): methylated C nucleotide
  modified_base (24)..(24): methylated C nucleotide
ttcgccgccgccactgccgccgccgct

SEQ ID NO: 51 - DNA, 27 bp, Artificial Sequence
  Synthetic
  modified_base (2)..(2): methylated C nucleotide
  modified_base (7)..(7): methylated C nucleotide
  modified_base (10)..(10): methylated C nucleotide
  modified_base (19)..(19): methylated C nucleotide
  modified_base (22)..(22): methylated C nucleotide
  modified_base (25)..(25): methylated C nucleotide
ccgagccgccgccaccttcgccgccgc

SEQ ID NO: 52 - DNA, 25 bp, Artificial Sequence
  Synthetic
  modified_base (3)..(3): methylated C nucleotide
  modified_base (5)..(5): methylated C nucleotide
  modified_base (7)..(7): methylated C nucleotide
  modified_base (11)..(11): methylated C nucleotide
  modified_base (22)..(22): methylated C nucleotide
tgcgcgcgctcgctcccagtccgaa

SEQ ID NO: 53 - DNA, 28 bp, Artificial Sequence
  Synthetic
gcggccacgccgccccgctgaccggtct

SEQ ID NO: 54 - DNA, 29 bp, Artificial Sequence
  Synthetic
ccacagagaagctgcgaagagcaccccgc

SEQ ID NO: 55 - DNA, 34 bp, Artificial Sequence
  Synthetic
gcgggctgtgcggatgccacagggagacgccgcg

SEQ ID NO: 56 - DNA, 26 bp, Artificial Sequence
  Synthetic
gccgcaaggctgtccccgcagccgcc

SEQ ID NO: 57 - DNA, 25 bp, Artificial Sequence
  Synthetic
gcgggtctgggcggcgccttggcgg

SEQ ID NO: 58 - DNA, 27 bp, Artificial Sequence
  Synthetic
cggtctagggtggcgagccgggccggc

SEQ ID NO: 59 - DNA, 33 bp, Artificial Sequence
  Synthetic
gccggcgggggaggagcgggggccgggccggcg

SEQ ID NO: 60 - DNA, 37 bp, Artificial Sequence
  Synthetic
gcgagcgccggcggggagaaggagggggccgggccgg

SEQ ID NO: 61 - DNA, 23 bp, Artificial Sequence
  Synthetic
gctatcgatgcgttccgcgctcg

SEQ ID NO: 62 - DNA, 42 bp, Artificial Sequence
  Synthetic
cgagctccgagcacaccgatgagttcggggccgggcggccgc

SEQ ID NO: 63 - DNA, 33 bp, Artificial Sequence
  Synthetic
gacgggcgtacgagagggagcggctgagggcgg

SEQ ID NO: 64 - DNA, 31 bp, Artificial Sequence
  Synthetic
ccgctgagcctctggccccgccgccgccttc

SEQ ID NO: 65 - DNA, 21 bp, Artificial Sequence
  Synthetic
cgctccgtacctctctcccgc

SEQ ID NO: 66 - DNA, 1740 bp, Homo sapiens
ggatcccagcctttccccagcccgtagccccgggacctccgcggtgggcggcgccgcgctgccggcgcagggagggcctctggtgcaccggcaccgctgagtcgggttctctcgccggcctgttcccgggagagcccggggccctgctcggagatgccgccccgggcccccagacaccggctccctggccttcctcgagcaaccccgagctcggctccggtctccagccaagcccaaccccgagaggccgcggccctactggctccgcctcccgcgttgctcccggaagccccgcccgaccgcggctcctgacagacgggccgctcagccaaccggggtggggcggggcccgatggcgcgcagccaatggtaggccgcgcctggcagacggacgggcgcggggcggggcgtgcgcaggcccgcccgagtctccgccgcccgtgccctgcgcccgcaacccgagccgcacccgccgcggacggagcccatgcgcggggcgaaccgcgcgcccccgcccccgccccgccccggcctcggccccggccctggccccgggggcagtcgcgcctgtgaacggtgagtgcgggcagggatcggccgggccgcgcgccctcctcgcccccaggcggcagcaatacgcgcggcgcgggccgggggcgcggggccggcgggcgtaagcggcggcggcggcggcgggtgggtggggccgggcggggcccgcgggcacaggtgagcgggcgtcgggggctgcggcgggcgggggccccttcctccctggggcctgcgggaatccgggccccacccgtggcctcgcgctgggcacggtccccacgccggcgtacccgggagcctcgggcccggcgccctcacacccgggggcgtctgggaggaggcggccgcggccacggcacgcccgggcacccccgattcagcatcacaggtcgcggaccaggccgggggcctcagccccagtgccttttccctctccgggtctcccgcgccgcttctcggccccttcctgtcgctcagtccctgcttcccaggagctcctctgtcttctccagctttctgtggctgaaagatgcccccggttccccgccgggggtgcggggcgctgcccgggtctgccctcccctcggcggcgcctagtacgcagtaggcgctcagcaaatacttgtcggaggcaccagcgccgcggggcctgcaggctggcactagcctgcccgggcacgccgtggcgcgctccgccgtggccagacctgttctggaggacggtaacctcagccctcgggcgcctccctttagcctttctgccgacccagcagcttctaatttgggtgcgtggttgagagcgctcagctgtcagccctgcctttgagggctgggtcccttttcccatcactgggtcattaagagcaagtgggggcgaggcgacagccctcccgcacgctgggttgcagctgcacaggtaggcacgctgcagtccttgctgcctggcgttggggcccagggaccgctgtgggtttgcccttcagatggccctgccagcagctgccctgtggggcctggggctgggcctgggcctggctgagcagggccctccttggcaggtggggcaggagaccctgtaggaggaccccgggccgcaggcccctgaggagcgatgacggaatataagctggtggtggtgggcgccggcggtgtgggcaagagtgcgctgaccatccagctgatccagaa

SEQ ID NO: 67 - DNA, 26 bp, Artificial Sequence
  Synthetic
  modified_base (3)..(3): methylated C nucleotide
  modified_base (5)..(5): methylated C nucleotide
  modified_base (7)..(7): methylated C nucleotide
  modified_base (12)..(12): methylated C nucleotide
  modified_base (17)..(17): methylated C nucleotide
  modified_base (19)..(19): methylated C nucleotide
ggcgcgcggttcgccccgcgcatggg

SEQ ID NO: 68 - DNA, 26 bp, Artificial Sequence
  Synthetic
ggcgcgcggttcgccccgcgcatggg

SEQ ID NO: 69 - DNA, 32 bp, Artificial Sequence
  Synthetic
  modified_base (4)..(4): methylated C nucleotide
  modified_base (10)..(10): methylated C nucleotide
  modified_base (27)..(27): methylated C nucleotide
ttccgtcatcgctcctcaggggcctgcggccc

SEQ ID NO: 70 - DNA, 28 bp, Artificial Sequence
  Synthetic
  modified_base (2)..(2): methylated C nucleotide
  modified_base (6)..(6): methylated C nucleotide
  modified_base (11)..(11): methylated C nucleotide
  modified_base (16)..(16): methylated C nucleotide
  modified_base (18)..(18): methylated C nucleotide
  modified_base (22)..(22): methylated C nucleotide
  modified_base (26)..(26): methylated C nucleotide
gcgcacgccccgccccgcgcccgtccgt

SEQ ID NO: 71 - DNA, 27 bp, Artificial Sequence
  Synthetic
  modified_base (3)..(3): methylated C nucleotide
  modified_base (8)..(8): methylated C nucleotide
  modified_base (14)..(14): methylated C nucleotide
  modified_base (20)..(20): methylated C nucleotide
  modified_base (22)..(22): methylated C nucleotide
  modified_base (24)..(24): methylated C nucleotide
ggcggggcgggggcgggggcgcgcggt

SEQ ID NO: 72 - DNA, 30 bp, Artificial Sequence
  Synthetic
  modified_base (7)..(7): methylated C nucleotide
  modified_base (11)..(11): methylated C nucleotide
  modified_base (27)..(27): methylated C nucleotide
gggaggcgcccgagggctgaggttaccgtc

SEQ ID NO: 73 - DNA, 40 bp, Artificial Sequence
  Synthetic
  modified_base (13)..(13): methylated C nucleotide
  modified_base (15)..(15): methylated C nucleotide
  modified_base (17)..(17): methylated C nucleotide
  modified_base (22)..(22): methylated C nucleotide
  modified_base (27)..(27): methylated C nucleotide
  modified_base (29)..(29): methylated C nucleotide
cgggggcgggggcgcgcggttcgccccgcgcatgggctcc

SEQ ID NO: 74 - DNA, 20 bp, Artificial Sequence
  Synthetic
  modified_base (3)..(3): methylated C nucleotide
  modified_base (5)..(5): methylated C nucleotide
  modified_base (7)..(7): methylated C nucleotide
  modified_base (12)..(12): methylated C nucleotide
  modified_base (17)..(17): methylated C nucleotide
  modified_base (19)..(19): methylated C nucleotide
ggcgcgcggttcgccccgcg

SEQ ID NO: 75 - DNA, 29 bp, Artificial Sequence
  Synthetic
  modified_base (2)..(2): methylated C nucleotide
  modified_base (4)..(4): methylated C nucleotide
  modified_base (10)..(10): methylated C nucleotide
  modified_base (17)..(17): methylated C nucleotide
  modified_base (27)..(27): methylated C nucleotide
gcgcgccatcgggccccgccccaccccgg

SEQ ID NO: 76 - DNA, 32 bp, Artificial Sequence
  Synthetic
  modified_base (2)..(2): methylated C nucleotide
  modified_base (5)..(5): methylated C nucleotide
  modified_base (8)..(8): methylated C nucleotide
  modified_base (11)..(11): methylated C nucleotide
  modified_base (14)..(14): methylated C nucleotide
  modified_base (17)..(17): methylated C nucleotide
  modified_base (23)..(23): methylated C nucleotide
  modified_base (27)..(27): methylated C nucleotide
  modified_base (30)..(30): methylated C nucleotide
ccgccgccgccgccgccgcttacgcccgccgg

SEQ ID NO: 77 - DNA, 28 bp, Artificial Sequence
  Synthetic
  modified_base (2)..(2): methylated C nucleotide
  modified_base (5)..(5): methylated C nucleotide
  modified_base (10)..(10): methylated C nucleotide
  modified_base (12)..(12): methylated C nucleotide
  modified_base (17)..(17): methylated C nucleotide
  modified_base (20)..(20): methylated C nucleotide
  modified_base (26)..(26): methylated C nucleotide
acggcggagcgcgccacggcgtgcccgg

SEQ ID NO: 78 - DNA, 31 bp, Artificial Sequence
  Synthetic
  modified_base (3)..(3): methylated C nucleotide
  modified_base (7)..(7): methylated C nucleotide
  modified_base (19)..(19): methylated C nucleotide
agcgtgcgggagggctgtcgcctcgccccca

SEQ ID NO: 79 - DNA, 32 bp, Artificial Sequence
  Synthetic
  modified_base (2)..(2): methylated C nucleotide
  modified_base (8)..(8): methylated C nucleotide
  modified_base (25)..(25): methylated C nucleotide
  modified_base (30)..(30): methylated C nucleotide
ccgtcatcgctcctcaggggcctgcggcccgg

SEQ ID NO: 80 - DNA, 28 bp, Artificial Sequence
  Synthetic
  modified_base (2)..(2): methylated C nucleotide
  modified_base (6)..(6): methylated C nucleotide
  modified_base (9)..(9): methylated C nucleotide
  modified_base (18)..(18): methylated C nucleotide
  modified_base (21)..(21): methylated C nucleotide
  modified_base (25)..(25): methylated C nucleotide
ccgcccgccgcagcccccgacgcccgct

SEQ ID NO: 81 - DNA, 29 bp, Artificial Sequence
  Synthetic
  modified_base (2)..(2): methylated C nucleotide
  modified_base (4)..(4): methylated C nucleotide
  modified_base (10)..(10): methylated C nucleotide
  modified_base (17)..(17): methylated C nucleotide
  modified_base (27)..(27): methylated C nucleotide
gcgcgccatcgggccccgccccaccccgg

SEQ ID NO: 82 - DNA, 55 bp, Artificial Sequence
  Synthetic
  modified_base (4)..(4): methylated C nucleotide
  modified_base (10)..(10): methylated C nucleotide
  modified_base (15)..(15): methylated C nucleotide
  modified_base (20)..(20): methylated C nucleotide
  modified_base (26)..(26): methylated C nucleotide
  modified_base (32)..(32): methylated C nucleotide
  modified_base (34)..(34): methylated C nucleotide
  modified_base (36)..(36): methylated C nucleotide
  modified_base (41)..(41): methylated C nucleotide
  modified_base (46)..(46): methylated C nucleotide
  modified_base (48)..(48): methylated C nucleotide
ggccgaggccggggcggggcgggggcgggggcgcgcggttcgccccgcgcatggg

SEQ ID NO: 83 - DNA, 33 bp, Artificial Sequence
  Synthetic
  modified_base (2)..(2): methylated C nucleotide
  modified_base (7)..(7): methylated C nucleotide
  modified_base (9)..(9): methylated C nucleotide
  modified_base (20)..(20): methylated C nucleotide
  modified_base (24)..(24): methylated C nucleotide
  modified_base (26)..(26): methylated C nucleotide
  modified_base (29)..(29): methylated C nucleotide
tcgccccgcgcatgggctccgtccgcggcgggt

SEQ ID NO: 84 - DNA, 26 bp, Artificial Sequence
  Synthetic
  modified_base (2)..(2): methylated C nucleotide
  modified_base (7)..(7): methylated C nucleotide
  modified_base (14)..(14): methylated C nucleotide
  modified_base (18)..(18): methylated C nucleotide
gcggctcgggttgcgggcgcagggca

SEQ ID NO: 85 - DNA, 38 bp, Artificial Sequence
  Synthetic
gcgccggcagcgcggcgccgcccaccgcggaggtcccg

SEQ ID NO: 86 - DNA, 33 bp, Artificial Sequence
  Synthetic
cggcgagagaacccgactcagcggtgccggtgc

SEQ ID NO: 87 - DNA, 34 bp, Artificial Sequence
  Synthetic
gcggcatctccgagcagggccccgggctctcccg

SEQ ID NO: 88 - DNA, 25 bp, Artificial Sequence
  Synthetic
ccggagccgagctcggggttgctcg

SEQ ID NO: 89 - DNA, 28 bp, Artificial Sequence
  Synthetic
gcggagccagtagggccgcggcctctcg

SEQ ID NO: 90 - DNA, 22 bp, Artificial Sequence
  Synthetic
cggggcttccgggagcaacgcg

SEQ ID NO: 91 - DNA, 27 bp, Artificial Sequence
  Synthetic
cggcccgtctgtcaggagccgcggtcg

SEQ ID NO: 92 - DNA, 24 bp, Artificial Sequence
  Synthetic
cgggcggcggagactcgggcgggc

SEQ ID NO: 93 - DNA, 38 bp, Artificial Sequence
  Synthetic
ccgttcacaggcgcgactgcccccggggccagggccgg

SEQ ID NO: 94 - DNA, 24 bp, Artificial Sequence
  Synthetic
cgaggagggcgcgcggcccggccg

SEQ ID NO: 95 - DNA, 35 bp, Artificial Sequence
  Synthetic
cgcgaggccacgggtggggcccggattcccgcagg

SEQ ID NO: 96 - DNA, 26 bp, Artificial Sequence
  Synthetic
cgggtacgccggcgtggggaccgtgc

SEQ ID NO: 97 - DNA, 31 bp, Artificial Sequence
  Synthetic
cgcccccgggtgtgagggcgccgggcccgag

SEQ ID NO: 98 - DNA, 25 bp, Artificial Sequence
  Synthetic
cgggcgtgccgtggccgcggccgcc

SEQ ID NO: 99 - DNA, 30 bp, Artificial Sequence
  Synthetic
cgagaagcggcgcgggagacccggagaggg

SEQ ID NO: 100 - DNA, 28 bp, Artificial Sequence
  Synthetic
gcgccccgcacccccggcggggaaccgg

SEQ ID NO: 101 - DNA, 35 bp, Artificial Sequence
  Synthetic
gcgtactaggcgccgccgaggggagggcagacccg

SEQ ID NO: 102 - DNA, 38 bp, Artificial Sequence
  Synthetic
cgcggcgctggtgcctccgacaagtatttgctgagcgc

SEQ ID NO: 103 - DNA, 25 bp, Artificial Sequence
  Synthetic
gggagccggtgtctgggggcccggg

SEQ ID NO: 104 - DNA, 25 bp, Artificial Sequence
  Synthetic
ctgccaggcgcggcctaccattggc

SEQ ID NO: 105 - DNA, 24 bp, Artificial Sequence
  Synthetic
ctgtgcccgcgggccccgcccggc

SEQ ID NO: 106 - DNA, 39 bp, Artificial Sequence
  Synthetic
cggcctggtccgcgacctgtgatgctgaatcgggggtgc

SEQ ID NO: 107 - DNA, 30 bp, Artificial Sequence
  Synthetic
cagcgcactcttgcccacaccgccggcgcc

SEQ ID NO: 108 - DNA, 1140 bp, Homo sapiens
  misc_feature (825)..(825): n is a, c, g, or t
ctgcagcctggtacgcgcgtggctggcggtgggcgcgcagtggttctcggtgtggagggcagctgttccccctgcgatgatttatactcacaggacaaggatgcgatttgtcaaacactacgaggagtagcagagaaagggagagggtttgaaagggagcaaaagaaaatggtaggcgcgcgtagttaattcatgcggctctcttactctgtttacatcctagaggtagagtgctcggctgcccggctgagtctcctccccaccttccccaccctccccaccctccccataagcgccctcccgggttcccaaagcagagggcgtgggggaaaagaaaaaagatcctctctcgctaatctccgcccaccggccctttataatgcgagggtctggacggctgaggacccccgagctgtgctgctcgcggccgccaccgcgggccccggccgtctttggctcccctcctgcctcgagaagggcagggcttctcagaggcttggcgggaaaaagaacggagggagggatcgctctgagtataaaagccgattttcggggctttatctaactcgctgtagtaattttaccgagaggcagagggagcgagcgggcggccgcctagggtggaagagccgggcgagtagagttgcacttgggaagggagatccggagcgaatcgggggcttcgcctctggcccagccctcccgctgatcccccaggcagtggtccgcaatccttgccgcattcacgaaaatttggccataacacggggcggtcactttacactggaacgtccaacacccgagcaaggacgcgagtctcccgancgcgaggagactattgagatgtgtcgattggctacatagggtgtcttttctcccactcctgcgccatcgacagttttctcagaatacctttggtaagtggggctggggtgggcgttatttcagaactgtatcgggcaaattgtattcctcaccgccacctcccgcggcttcttaagggcgccagggccgctttcgattcctctgccgctgcggggccgacgttcgggactgagcactgcgcgctgcgccaggtttccgcaccaagacccctttaactcaagactgcctcccgctttgtgtgccccgctccagcag

SEQ ID NO: 109 - DNA, 27 bp, Artificial Sequence
  Synthetic
  modified_base (1)..(1): methylated C nucleotide
  modified_base (5)..(5): methylated C nucleotide
  modified_base (12)..(12): methylated C nucleotide
  modified_base (14)..(14): methylated C nucleotide
  modified_base (20)..(20): methylated C nucleotide
  modified_base (24)..(24): methylated C nucleotide
  modified_base (26)..(26): methylated C nucleotide
cggccggggcccgcggtggcggccgcg

SEQ ID NO: 110 - DNA, 25 bp, Artificial Sequence
  Synthetic
  modified_base (3)..(3): methylated C nucleotide
  modified_base (18)..(18): methylated C nucleotide
  modified_base (20)..(20): methylated C nucleotide
  modified_base (22)..(22): methylated C nucleotide
gccgcatgaattaactacgcgcgcc

SEQ ID NO: 111 - DNA, 25 bp, Artificial Sequence
  Synthetic
  modified_base (3)..(3): methylated C nucleotide
  modified_base (10)..(10): methylated C nucleotide
  modified_base (22)..(22): methylated C nucleotide
gccggtgggcggagagattagcgag

SEQ ID NO: 112 - DNA, 29 bp, Artificial Sequence
  Synthetic
  modified_base (3)..(3): methylated C nucleotide
  modified_base (16)..(16): methylated C nucleotide
  modified_base (28)..(28): methylated C nucleotide
agcgatccctccctccgttctttttcccg

SEQ ID NO: 113 - DNA, 31 bp, Artificial Sequence
  Synthetic
  modified_base (2)..(2): methylated C nucleotide
  modified_base (29)..(29): methylated C nucleotide
tcgcagggggaacagctgccctccacaccga

SEQ ID NO: 114 - DNA, 27 bp, Artificial Sequence
  Synthetic
  modified_base (3)..(3): methylated C nucleotide
  modified_base (5)..(5): methylated C nucleotide
  modified_base (12)..(12): methylated C nucleotide
  modified_base (21)..(21): methylated C nucleotide
  modified_base (23)..(23): methylated C nucleotide
  modified_base (25)..(25): methylated C nucleotide
tgcgcgcccaccgccagccacgcgcgt

SEQ ID NO: 115 - DNA, 34 bp, Artificial Sequence
  Synthetic
  modified_base (4)..(4): methylated C nucleotide
  modified_base (9)..(9): methylated C nucleotide
  modified_base (30)..(30): methylated C nucleotide
  modified_base (32)..(32): methylated C nucleotide
gggcgcctcgctaaggctggggaaagggccgcgc

SEQ ID NO: 116 - DNA, 30 bp, Artificial Sequence
  Synthetic
ctactcctcgtagtgtttgacaaatcgcat

SEQ ID NO: 117 - DNA, 27 bp, Artificial Sequence
  Synthetic
ctcagccgggcagccgagcactctacc

SEQ ID NO: 118 - DNA, 34 bp, Artificial Sequence
  Synthetic
ccacgccctctgctttgggaacccgggagggcgc

SEQ ID NO: 119 - DNA, 28 bp, Artificial Sequence
  Synthetic
cgagttagataaagccccgaaaatcggc

SEQ ID NO: 120 - DNA, 33 bp, Artificial Sequence
  Synthetic
cggctcttccaccctaggcggccgcccgctcgc

SEQ ID NO: 121 - DNA, 24 bp, Artificial Sequence
  Synthetic
ggcgaagcccccgattcgctccgg

SEQ ID NO: 122 - DNA, 37 bp, Artificial Sequence
  Synthetic
  misc_feature (12)..(12): n is a, c, g, or t
gtctcctcgcgntcgggagactcgcgtccttgctcgg

SEQ ID NO: 123 - DNA, 37 bp, Artificial Sequence
  Synthetic
gccgcgggaggtggcggtgaggaatacaatttgcccg

SEQ ID NO: 124 - DNA, 36 bp, Artificial Sequence
  Synthetic
cgtcggccccgcagcggcagaggaatcgaaagcggc

SEQ ID NO: 125 - DNA, 30 bp, Artificial Sequence
  Synthetic
cttggtgcggaaacctggcgcagcgcgcag

SEQ ID NO: 126 - DNA, 25 bp, Artificial Sequence
  Synthetic
cagcacagctcgggggtcctcagcc

SEQ ID NO: 127 - DNA, 28 bp, Artificial Sequence
  Synthetic
cgtgaatgcggcaaggattgcggaccac

SEQ ID NO: 128 - DNA, 20 bp, Artificial Sequence
  Synthetic
gtgaccgccccgtgttatgg

SEQ ID NO: 129 - DNA, 22 bp, Artificial Sequence
  Synthetic
gtcgatggcgcaggagtgggag

SEQ ID NO: 130 - DNA, 31 bp, Artificial Sequence
  Synthetic
ctgctggagcggggcacacaaagcgggaggc

SEQ ID NO: 131 - DNA, 1314 bp, Homo sapiens
gagctccgggtacctggagaacatgaatctcccgggtgtactgtccccatgagggtcaccgaggaacctatggatcttccactcttcgcccagaatgtcttccctctatcccctccacctccccaaattccagcaccaggggccacctcagagccacaaatcctgaaaggaccacccaggtgactcgggcccacacacccctctttcggggtacacttggtggcaggctaggagcttttggcctcagctggtggtgccacacaccagattcgtcacagagacccattttttatcagtcccaggccagaagtacgaagactgatcttaacgatgtggcctgcctgggaggtaaggcggcaggcgttgcagaattgatgggaactgtggcacaggtgggaaacctggtttaacaaattcttcattgattcaggggaccactttccttgagccaagtcttggcaagcggccggcgaaactcacaggtccctttcctggctgcgtccccagcctccagccttccccgccccagagatgccccaggagcggcccctcggtgtaggtaacgggtgcccgggcggctccgtccgccgcctagagcctggaagccgccactgcggcccaggacaatccggctacgcggccggcgccgaccccgcacgctggagtccgctgccgcacggcgctggcagtcgggggtggtgtctgaagtcaggcgcttcctgccttttcgtcggcccgggtgcccggctcgcgccgccaggctctgggatcccaggtcgccccgcccagcagcccgcgccctgctcggtgcgctcagcgtccccgccccttaccccaaacccccaccctctgtgccctcaggggggcacccccatcggggcgggaggggggggtcagctgtgccccggtcgccgagtggcgaggaggtgacggtagccgccttcctatttccgcccggcgggcagcgctgcggggcgagtgccagcagagaggcgctcggtcctccctccgccctcccgcgccgggggcaggccctgcctagtctgcgtctttttcccccgcaccgcggcgccgctccgccactcgggcaccgcaggtagggcaggaggctggagagcctgctgcccgcccgcccgtaaaatggtcccctcggctggacagctcgccctgttcgctctgggtattgtgttggctgcgtgccaggccttggagaacagcacgtccccgctgagtgcagacccgcccgtggctgcagcagtggtgtcccattttaatgactgcccagattcccacactcagttctgcttccatgga

SEQ ID NO: 132 - DNA, 29 bp, Artificial Sequence
  Synthetic
  modified_base (2)..(2): methylated C nucleotide
  modified_base (5)..(5): methylated C nucleotide
  modified_base (7)..(7): methylated C nucleotide
  modified_base (15)..(15): methylated C nucleotide
  modified_base (27)..(27): methylated C nucleotide
ccggcgcgggagggcggagggaggaccgt

SEQ ID NO: 133 - DNA, 28 bp, Artificial Sequence
  Synthetic
  modified_base (2)..(2): methylated C nucleotide
  modified_base (7)..(7): methylated C nucleotide
  modified_base (12)..(12): methylated C nucleotide
  modified_base (19)..(19): methylated C nucleotide
  modified_base (22)..(22): methylated C nucleotide
  modified_base (26)..(26): methylated C nucleotide
tcgccccgcagcgctgcccgccgggcgg

SEQ ID NO: 134 - DNA, 27 bp, Artificial Sequence
  Synthetic
  modified_base (6)..(6): methylated C nucleotide
  modified_base (12)..(12): methylated C nucleotide
  modified_base (19)..(19): methylated C nucleotide
  modified_base (25)..(25): methylated C nucleotide
aggggcggggacgctgagcggcaccga

SEQ ID NO: 135 - DNA, 25 bp, Artificial Sequence
  Synthetic
  modified_base (5)..(5): methylated C nucleotide
  modified_base (7)..(7): methylated C nucleotide
  modified_base (19)..(19): methylated C nucleotide
  modified_base (23)..(23): methylated C nucleotide
agggcgcgggctgctgggcgggcga

SEQ ID NO: 136 - DNA, 35 bp, Artificial Sequence
  Synthetic
  modified_base (7)..(7): methylated C nucleotide
  modified_base (10)..(10): methylated C nucleotide
  modified_base (12)..(12): methylated C nucleotide
  modified_base (17)..(17): methylated C nucleotide
  modified_base (25)..(25): methylated C nucleotide
  modified_base (30)..(30): methylated C nucleotide
  modified_base (33)..(33): methylated C nucleotide
gcctggcggcgcgagccgggcacccgggccgacga

SEQ ID NO: 137 - DNA, 28 bp, Artificial Sequence
  Synthetic
  modified_base (3)..(3): methylated C nucleotide
  modified_base (7)..(7): methylated C nucleotide
  modified_base (13)..(13): methylated C nucleotide
  modified_base (16)..(16): methylated C nucleotide
  modified_base (19)..(19): methylated C nucleotide
  modified_base (23)..(23): methylated C nucleotide
  modified_base (25)..(25): methylated C nucleotide
agcgtgcggggtcggcgccggccgcgta

SEQ ID NO: 138 - DNA, 29 bp, Artificial Sequence
  Synthetic
  modified_base (2)..(2): methylated C nucleotide
  modified_base (5)..(5): methylated C nucleotide
  modified_base (9)..(9): methylated C nucleotide
  modified_base (15)..(15): methylated C nucleotide
  modified_base (19)..(19): methylated C nucleotide
  modified_base (27)..(27): methylated C nucleotide
gcggcggacggagccgcccgggcacccgt

SEQ ID NO: 139 - DNA, 34 bp, Artificial Sequence
  Synthetic
  modified_base (4)..(4): methylated C nucleotide
  modified_base (9)..(9): methylated C nucleotide
  modified_base (32)..(32): methylated C nucleotide
gggcggggcgacctgggatcccagtgcctggcgg

SEQ ID NO: 140 - DNA, 26 bp, Artificial Sequence
  Synthetic
  modified_base (2)..(2): methylated C nucleotide
  modified_base (24)..(24): methylated C nucleotide
ccgctcctggggcatctctggggcgg

SEQ ID NO: 141 - DNA, 27 bp, Artificial Sequence
  Synthetic
  modified_base (2)..(2): methylated C nucleotide
  modified_base (6)..(6): methylated C nucleotide
  modified_base (10)..(10): methylated C nucleotide
acgggcgggcgggcagcaggctctcca

SEQ ID NO: 142 - DNA, 30 bp, Artificial Sequence
  Synthetic
  modified_base (2)..(2): methylated C nucleotide
  modified_base (28)..(28): methylated C nucleotide
ccgccttacctcccaggcaggccacatcgt

SEQ ID NO: 143 - DNA, 25 bp, Artificial Sequence
  Synthetic
  modified_base (2)..(2): methylated C nucleotide
  modified_base (23)..(23): methylated C nucleotide
ccgaaagaggggtgtgtgggcccga

SEQ ID NO: 144 - DNA, 31 bp, Artificial Sequence
  Synthetic
  modified_base (2)..(2): methylated C nucleotide
  modified_base (9)..(9): methylated C nucleotide
  modified_base (16)..(16): methylated C nucleotide
  modified_base (21)..(21): methylated C nucleotide
  modified_base (24)..(24): methylated C nucleotide
  modified_base (27)..(27): methylated C nucleotide
  modified_base (29)..(29): methylated C nucleotide
gcggtgcccgagtggcggagcggcgccgcgg

SEQ ID NO: 145 - DNA, 25 bp, Artificial Sequence
  Synthetic
catgttctccaggtacccggagctc

SEQ ID NO: 146 - DNA, 31 bp, Artificial Sequence
  Synthetic
cggtgaccctcatggggacagtacacccggg

SEQ ID NO: 147 - DNA, 30 bp, Artificial Sequence
  Synthetic
gatagagggaagacattctgggcgaagagt

SEQ ID NO: 148 - DNA, 28 bp, Artificial Sequence
  Synthetic
gtgagtttcgccggccgcttgccaagac

SEQ ID NO: 149 - DNA, 27 bp, Artificial Sequence
  Synthetic
ccgcgtagccggattgtcctgggccgc

SEQ ID NO: 150 - DNA, 21 bp, Artificial Sequence
  Synthetic
cgccgtgcggcagcggactcc

SEQ ID NO: 151 - DNA, 26 bp, Artificial Sequence
  Synthetic
gcgcctgacttcagacaccacccccg

SEQ ID NO: 152 - DNA, 37 bp, Artificial Sequence
  Synthetic
gcgaccggggcacagctgacccccccctcccgccccg

SEQ ID NO: 153 - DNA, 28 bp, Artificial Sequence
  Synthetic
gcggctaccgtcacctcctcgccactcg

SEQ ID NO: 154 - DNA, 25 bp, Artificial Sequence
  Synthetic
gcgaacagggcgagctgtccagccg

SEQ ID NO: 155 - DNA, 25 bp, Artificial Sequence
  Synthetic
gccacgggcgggtctgcactcagcg

SEQ ID NO: 156 - DNA, 28 bp, Artificial Sequence
  Synthetic
gggtctctgtgacgaatctggtgtgtgg

SEQ ID NO: 157 - DNA, 24 bp, Artificial Sequence
  Synthetic
cagttcccatcaattctgcaacgc

SEQ ID NO: 158 - DNA, 25 bp, Artificial Sequence
  Synthetic
gcgggggaaaaagacgcagactagg

SEQ ID NO: 159 - DNA, 31 bp, Artificial Sequence
  Synthetic
gacgtgctgttctccaaggcctggcacgcag

SEQ ID NO: 160-162 - skipped (3 entries)

SEQ ID NO: 163 - DNA, 24 bp, Artificial Sequence
  Synthetic
  modified_base (3)..(3): methylated C nucleotide
  modified_base (7)..(7): methylated C nucleotide
  modified_base (9)..(9): methylated C nucleotide
  modified_base (17)..(17): methylated C nucleotide
  modified_base (21)..(21): methylated C nucleotide
cacgcacgcgcatccccgcccgtg

SEQ ID NO: 164 - DNA, 25 bp, Artificial Sequence
  Synthetic
  modified_base (4)..(4): methylated C nucleotide
  modified_base (8)..(8): methylated C nucleotide
  modified_base (10)..(10): methylated C nucleotide
  modified_base (18)..(18): methylated C nucleotide
  modified_base (22)..(22): methylated C nucleotide
acacgcacgcgcatccccgcccgtg

SEQ ID NO: 165 - DNA, 26 bp, Artificial Sequence
  Synthetic
  modified_base (5)..(5): methylated C nucleotide
  modified_base (9)..(9): methylated C nucleotide
  modified_base (11)..(11): methylated C nucleotide
  modified_base (19)..(19): methylated C nucleotide
  modified_base (23)..(23): methylated C nucleotide
cacacgcacgcgcatccccgcccgtg

SEQ ID NO: 166 - DNA, 27 bp, Artificial Sequence
  Synthetic
  modified_base (6)..(6): methylated C nucleotide
  modified_base (10)..(10): methylated C nucleotide
  modified_base (12)..(12): methylated C nucleotide
  modified_base (20)..(20): methylated C nucleotide
  modified_base (24)..(24): methylated C nucleotide
acacacgcacgcgcatccccgcccgtg

SEQ ID NO: 167 - DNA, 28 bp, Artificial Sequence
  Synthetic
  modified_base (7)..(7): methylated C nucleotide
  modified_base (11)..(11): methylated C nucleotide
  modified_base (13)..(13): methylated C nucleotide
  modified_base (21)..(21): methylated C nucleotide
  modified_base (25)..(25): methylated C nucleotide
tacacacgcacgcgcatccccgcccgtg

SEQ ID NO: 168 - DNA, 29 bp, Artificial Sequence
  Synthetic
  modified_base (8)..(8): methylated C nucleotide
  modified_base (12)..(12): methylated C nucleotide
  modified_base (14)..(14): methylated C nucleotide
  modified_base (22)..(22): methylated C nucleotide
  modified_base (26)..(26): methylated C nucleotide
ctacacacgcacgcgcatccccgcccgtg

SEQ ID NO: 169 - DNA, 25 bp, Artificial Sequence
  Synthetic
  modified_base (3)..(3): methylated C nucleotide
  modified_base (7)..(7): methylated C nucleotide
  modified_base (9)..(9): methylated C nucleotide
  modified_base (17)..(17): methylated C nucleotide
  modified_base (21)..(21): methylated C nucleotide
cacgcacgcgcatccccgcccgtgt

SEQ ID NO: 170 - DNA, 26 bp, Artificial Sequence
  Synthetic
  modified_base (3)..(3): methylated C nucleotide
  modified_base (7)..(7): methylated C nucleotide
  modified_base (9)..(9): methylated C nucleotide
  modified_base (17)..(17): methylated C nucleotide
  modified_base (21)..(21): methylated C nucleotide
cacgcacgcgcatccccgcccgtgtc

SEQ ID NO: 171 - DNA, 27 bp, Artificial Sequence
  Synthetic
  modified_base (3)..(3): methylated C nucleotide
  modified_base (7)..(7): methylated C nucleotide
  modified_base (9)..(9): methylated C nucleotide
  modified_base (17)..(17): methylated C nucleotide
  modified_base (21)..(21): methylated C nucleotide
cacgcacgcgcatccccgcccgtgtcc

SEQ ID NO: 172 - DNA, 28 bp, Artificial Sequence
  Synthetic
  modified_base (3)..(3): methylated C nucleotide
  modified_base (7)..(7): methylated C nucleotide
  modified_base (9)..(9): methylated C nucleotide
  modified_base (17)..(17): methylated C nucleotide
  modified_base (21)..(21): methylated C nucleotide
cacgcacgcgcatccccgcccgtgtcca

SEQ ID NO: 173 - DNA, 29 bp, Artificial Sequence
  Synthetic
  modified_base (3)..(3): methylated C nucleotide
  modified_base (7)..(7): methylated C nucleotide
  modified_base (9)..(9): methylated C nucleotide
  modified_base (17)..(17): methylated C nucleotide
  modified_base (21)..(21): methylated C nucleotide
cacgcacgcgcatccccgcccgtgtccac

SEQ ID NO: 174 - DNA, 26 bp, Artificial Sequence
  Synthetic
  modified_base (4)..(4): methylated C nucleotide
  modified_base (8)..(8): methylated C nucleotide
  modified_base (10)..(10): methylated C nucleotide
  modified_base (18)..(18): methylated C nucleotide
  modified_base (22)..(22): methylated C nucleotide
acacgcacgcgcatccccgcccgtgt

SEQ ID NO: 175 - DNA, 28 bp, Artificial Sequence
  Synthetic
  modified_base (5)..(5): methylated C nucleotide
  modified_base (9)..(9): methylated C nucleotide
  modified_base (11)..(11): methylated C nucleotide
  modified_base (19)..(19): methylated C nucleotide
  modified_base (23)..(23): methylated C nucleotide
cacacgcacgcgcatccccgcccgtgtc

SEQ ID NO: 176 - DNA, 30 bp, Artificial Sequence
  Synthetic
  modified_base (6)..(6): methylated C nucleotide
  modified_base (10)..(10): methylated C nucleotide
  modified_base (12)..(12): methylated C nucleotide
  modified_base (20)..(20): methylated C nucleotide
  modified_base (24)..(24): methylated C nucleotide
acacacgcacgcgcatccccgcccgtgtcc

SEQ ID NO: 177 - DNA, 32 bp, Artificial Sequence
  Synthetic
  modified_base (7)..(7): methylated C nucleotide
  modified_base (11)..(11): methylated C nucleotide
  modified_base (13)..(13): methylated C nucleotide
  modified_base (21)..(21): methylated C nucleotide
  modified_base (25)..(25): methylated C nucleotide
tacacacgcacgcgcatccccgcccgtgtcca

SEQ ID NO: 178 - DNA, 34 bp, Artificial Sequence
  Synthetic
  modified_base (8)..(8): methylated C nucleotide
  modified_base (12)..(12): methylated C nucleotide
  modified_base (14)..(14): methylated C nucleotide
  modified_base (22)..(22): methylated C nucleotide
  modified_base (26)..(26): methylated C nucleotide
ctacacacgcacgcgcatccccgcccgtgtccac

SEQ ID NO: 179 - DNA, 24 bp, Artificial Sequence
  Synthetic
  modified_base (6)..(6): methylated C nucleotide
  modified_base (10)..(10): methylated C nucleotide
  modified_base (12)..(12): methylated C nucleotide
  modified_base (20)..(20): methylated C nucleotide
  modified_base (24)..(24): methylated C nucleotide
acacacgcacgcgcatccccgccc

SEQ ID NO: 180 - DNA, 24 bp, Artificial Sequence
  Synthetic
  modified_base (9)..(9): methylated C nucleotide
  modified_base (13)..(13): methylated C nucleotide
  modified_base (15)..(15): methylated C nucleotide
  modified_base (23)..(23): methylated C nucleotide
actacacacgcacgcgcatccccg

SEQ ID NO: 181 - DNA, 24 bp, Artificial Sequence
  Synthetic
  modified_base (12)..(12): methylated C nucleotide
  modified_base (16)..(16): methylated C nucleotide
  modified_base (18)..(18): methylated C nucleotide
cgcactacacacgcacgcgcatcc

SEQ ID NO: 182 - DNA, 24 bp, Artificial Sequence
  Synthetic
  modified_base (15)..(15): methylated C nucleotide
  modified_base (19)..(19): methylated C nucleotide
  modified_base (21)..(21): methylated C nucleotide
ccgcgcactacacacgcacgcgca

SEQ ID NO: 183 - DNA, 24 bp, Artificial Sequence
  Synthetic
  modified_base (18)..(18): methylated C nucleotide
  modified_base (22)..(22): methylated C nucleotide
  modified_base (24)..(24): methylated C nucleotide
tgtccgcgcactacacacgcacgc

SEQ ID NO: 184 - DNA, 24 bp, Artificial Sequence
  Synthetic
  modified_base (4)..(4): methylated C nucleotide
  modified_base (6)..(6): methylated C nucleotide
  modified_base (14)..(14): methylated C nucleotide
  modified_base (18)..(18): methylated C nucleotide
gcacgcgcatccccgcccgtgtcc

SEQ ID NO: 185 - DNA, 24 bp, Artificial Sequence
  Synthetic
  modified_base (1)..(1): methylated C nucleotide
  modified_base (3)..(3): methylated C nucleotide
  modified_base (11)..(11): methylated C nucleotide
  modified_base (15)..(15): methylated C nucleotide
cgcgcatccccgcccgtgtccacc

SEQ ID NO: 186 - DNA, 24 bp, Artificial Sequence
  Synthetic
  modified_base (8)..(8): methylated C nucleotide
  modified_base (12)..(12): methylated C nucleotide
gcatccccgcccgtgtccacctga

SEQ ID NO: 187 - DNA, 24 bp, Artificial Sequence
  Synthetic
  modified_base (5)..(5): methylated C nucleotide
  modified_base (9)..(9): methylated C nucleotide
tccccgcccgtgtccacctgaaca

SEQ ID NO: 188 - DNA, 24 bp, Artificial Sequence
  Synthetic
  modified_base (2)..(2): methylated C nucleotide
  modified_base (6)..(6): methylated C nucleotide
ccgcccgtgtccacctgaacacct

SEQ ID NO: 189 - DNA, 22 bp, Artificial Sequence
  Synthetic
  modified_base (1)..(1): methylated C nucleotide
  modified_base (5)..(5): methylated C nucleotide
  modified_base (7)..(7): methylated C nucleotide
  modified_base (15)..(15): methylated C nucleotide
  modified_base (19)..(19): methylated C nucleotide
cgcacgcgcatccccgcccgtg

SEQ ID NO: 190 - DNA, 20 bp, Artificial Sequence
  Synthetic
  modified_base (3)..(3): methylated C nucleotide
  modified_base (5)..(5): methylated C nucleotide
  modified_base (13)..(13): methylated C nucleotide
  modified_base (17)..(17): methylated C nucleotide
cacgcgcatccccgcccgtg

SEQ ID NO: 191 - DNA, 18 bp, Artificial Sequence
  Synthetic
  modified_base (1)..(1): methylated C nucleotide
  modified_base (3)..(3): methylated C nucleotide
  modified_base (11)..(11): methylated C nucleotide
  modified_base (15)..(15): methylated C nucleotide
cgcgcatccccgcccgtg

SEQ ID NO: 192 - DNA, 16 bp, Artificial Sequence
  Synthetic
  modified_base (1)..(1): methylated C nucleotide
  modified_base (9)..(9): methylated C nucleotide
  modified_base (13)..(13): methylated C nucleotide
cgcatccccgcccgtg

SEQ ID NO: 193 - DNA, 15 bp, Artificial Sequence
  Synthetic
  modified_base (8)..(8): methylated C nucleotide
  modified_base (12)..(12): methylated C nucleotide
gcatccccgcccgtg

SEQ ID NO: 194 - DNA, 22 bp, Artificial Sequence
  Synthetic
  modified_base (3)..(3): methylated C nucleotide
  modified_base (7)..(7): methylated C nucleotide
  modified_base (9)..(9): methylated C nucleotide
  modified_base (17)..(17): methylated C nucleotide
  modified_base (21)..(21): methylated C nucleotide
cacgcacgcgcatccccgcccg

SEQ ID NO: 195 - DNA, 20 bp, Artificial Sequence
  Synthetic
  modified_base (3)..(3): methylated C nucleotide
  modified_base (7)..(7): methylated C nucleotide
  modified_base (9)..(9): methylated C nucleotide
  modified_base (17)..(17): methylated C nucleotide
cacgcacgcgcatccccgcc

SEQ ID NO: 196 - DNA, 18 bp, Artificial Sequence
  Synthetic
  modified_base (3)..(3): methylated C nucleotide
  modified_base (7)..(7): methylated C nucleotide
  modified_base (9)..(9): methylated C nucleotide
  modified_base (17)..(17): methylated C nucleotide
cacgcacgcgcatccccg

SEQ ID NO: 197 - DNA, 16 bp, Artificial Sequence
  Synthetic
  modified_base (3)..(3): methylated C nucleotide
  modified_base (7)..(7): methylated C nucleotide
  modified_base (9)..(9): methylated C nucleotide
cacgcacgcgcatccc

SEQ ID NO: 198 - DNA, 15 bp, Artificial Sequence
  Synthetic
  modified_base (3)..(3): methylated C nucleotide
  modified_base (7)..(7): methylated C nucleotide
  modified_base (9)..(9): methylated C nucleotide
cacgcacgcgcatcc

SEQ ID NO: 199 - DNA, 24 bp, Artificial Sequence
  Synthetic
  modified_base (3)..(3): methylated C nucleotide
  modified_base (7)..(7): methylated C nucleotide
  modified_base (9)..(9): methylated C nucleotide
  modified_base (17)..(17): methylated C nucleotide
  modified_base (21)..(21): methylated C nucleotide
cacgcacgcgtatccccgcccgtg

SEQ ID NO: 200 - DNA, 24 bp, Artificial Sequence
  Synthetic
  modified_base (3)..(3): methylated C nucleotide
  modified_base (7)..(7): methylated C nucleotide
  modified_base (9)..(9): methylated C nucleotide
  modified_base (17)..(17): methylated C nucleotide
  modified_base (21)..(21): methylated C nucleotide
cacgcgcgcgcatccccgcccgtg

SEQ ID NO: 201 - DNA, 24 bp, Artificial Sequence
  Synthetic
  modified_base (3)..(3): methylated C nucleotide
  modified_base (7)..(7): methylated C nucleotide
  modified_base (9)..(9): methylated C nucleotide
  modified_base (17)..(17): methylated C nucleotide
  modified_base (21)..(21): methylated C nucleotide
cacgcacgcgcatccccgaccgtg

SEQ ID NO: 202 - DNA, 26 bp, Artificial Sequence
  Synthetic
  modified_base (3)..(3): methylated C nucleotide
  modified_base (7)..(7): methylated C nucleotide
  modified_base (12)..(12): methylated C nucleotide
  modified_base (17)..(17): methylated C nucleotide
  modified_base (21)..(21): methylated C nucleotide
  modified_base (23)..(23): methylated C nucleotide
cccgcccgctccgctgcgcccgcggg

SEQ ID NO: 203 - DNA, 27 bp, Artificial Sequence
  Synthetic
  modified_base (4)..(4): methylated C nucleotide
  modified_base (8)..(8): methylated C nucleotide
  modified_base (13)..(13): methylated C nucleotide
  modified_base (18)..(18): methylated C nucleotide
  modified_base (22)..(22): methylated C nucleotide
  modified_base (24)..(24): methylated C nucleotide
acccgcccgctccgctgcgcccgcggg

SEQ ID NO: 204 - DNA, 28 bp, Artificial Sequence
  Synthetic
  modified_base (5)..(5): methylated C nucleotide
  modified_base (9)..(9): methylated C nucleotide
  modified_base (14)..(14): methylated C nucleotide
  modified_base (19)..(19): methylated C nucleotide
  modified_base (23)..(23): methylated C nucleotide
  modified_base (25)..(25): methylated C nucleotide
cacccgcccgctccgctgcgcccgcggg

SEQ ID NO: 205 - DNA, 29 bp, Artificial Sequence
  Synthetic
  modified_base (6)..(6): methylated C nucleotide
  modified_base (10)..(10): methylated C nucleotide
  modified_base (15)..(15): methylated C nucleotide
  modified_base (20)..(20): methylated C nucleotide
  modified_base (24)..(24): methylated C nucleotide
  modified_base (26)..(26): methylated C nucleotide
ccacccgcccgctccgctgcgcccgcggg

SEQ ID NO: 206 - DNA, 30 bp, Artificial Sequence
  Synthetic
  modified_base (7)..(7): methylated C nucleotide
  modified_base (11)..(11): methylated C nucleotide
  modified_base (16)..(16): methylated C nucleotide
  modified_base (21)..(21): methylated C nucleotide
  modified_base (25)..(25): methylated C nucleotide
  modified_base (27)..(27): methylated C nucleotide
gccacccgcccgctccgctgcgcccgcggg

SEQ ID NO: 207 - DNA, 31 bp, Artificial Sequence
  Synthetic
  modified_base (8)..(8): methylated C nucleotide
  modified_base (12)..(12): methylated C nucleotide
  modified_base (17)..(17): methylated C nucleotide
  modified_base (22)..(22): methylated C nucleotide
  modified_base (26)..(26): methylated C nucleotide
  modified_base (28)..(28): methylated C nucleotide
ggccacccgcccgctccgctgcgcccgcggg

SEQ ID NO: 208 - DNA, 27 bp, Artificial Sequence
  Synthetic
  modified_base (3)..(3): methylated C nucleotide
  modified_base (7)..(7): methylated C nucleotide
  modified_base (12)..(12): methylated C nucleotide
  modified_base (17)..(17): methylated C nucleotide
  modified_base (21)..(21): methylated C nucleotide
  modified_base (23)..(23): methylated C nucleotide
cccgcccgctccgctgcgcccgcgggg

SEQ ID NO: 209 - DNA, 28 bp, Artificial Sequence
  Synthetic
  modified_base (3)..(3): methylated C nucleotide
  modified_base (7)..(7): methylated C nucleotide
  modified_base (12)..(12): methylated C nucleotide
  modified_base (17)..(17): methylated C nucleotide
  modified_base (21)..(21): methylated C nucleotide
  modified_base (23)..(23): methylated C nucleotide
cccgcccgctccgctgcgcccgcggggc

SEQ ID NO: 210 - DNA, 29 bp, Artificial Sequence
  Synthetic
  modified_base (3)..(3): methylated C nucleotide
  modified_base (7)..(7): methylated C nucleotide
  modified_base (12)..(12): methylated C nucleotide
  modified_base (17)..(17): methylated C nucleotide
  modified_base (21)..(21): methylated C nucleotide
  modified_base (23)..(23): methylated C nucleotide
cccgcccgctccgctgcgcccgcggggcc

SEQ ID NO: 211 - DNA, 30 bp, Artificial Sequence
  Synthetic
  modified_base (3)..(3): methylated C nucleotide
  modified_base (7)..(7): methylated C nucleotide
  modified_base (12)..(12): methylated C nucleotide
  modified_base (17)..(17): methylated C nucleotide
  modified_base (21)..(21): methylated C nucleotide
  modified_base (23)..(23): methylated C nucleotide
cccgcccgctccgctgcgcccgcggggccc

SEQ ID NO: 212 - DNA, 31 bp, Artificial Sequence
  Synthetic
  modified_base (3)..(3): methylated C nucleotide
  modified_base (7)..(7): methylated C nucleotide
  modified_base (12)..(12): methylated C nucleotide
  modified_base (17)..(17): methylated C nucleotide
  modified_base (21)..(21): methylated C nucleotide
  modified_base (23)..(23): methylated C nucleotide
cccgcccgctccgctgcgcccgcggggcccg

SEQ ID NO: 213 - DNA, 28 bp, Artificial Sequence
  Synthetic
  modified_base (4)..(4): methylated C nucleotide
  modified_base (8)..(8): methylated C nucleotide
  modified_base (13)..(13): methylated C nucleotide
  modified_base (18)..(18): methylated C nucleotide
  modified_base (22)..(22): methylated C nucleotide
  modified_base (24)..(24): methylated C nucleotide
acccgcccgctccgctgcgcccgcgggg

SEQ ID NO: 214 - DNA, 30 bp, Artificial Sequence
  Synthetic
  modified_base (5)..(5): methylated C nucleotide
  modified_base (9)..(9): methylated C nucleotide
  modified_base (14)..(14): methylated C nucleotide
  modified_base (19)..(19): methylated C nucleotide
  modified_base (23)..(23): methylated C nucleotide
  modified_base (25)..(25): methylated C nucleotide
cacccgcccgctccgctgcgcccgcggggc

SEQ ID NO: 215 - DNA, 32 bp, Artificial Sequence
  Synthetic
  modified_base (6)..(6): methylated C nucleotide
  modified_base (10)..(10): methylated C nucleotide
  modified_base (15)..(15): methylated C nucleotide
  modified_base (20)..(20): methylated C nucleotide
  modified_base (24)..(24): methylated C nucleotide
  modified_base (26)..(26): methylated C nucleotide
ccacccgcccgctccgctgcgcccgcggggcc

SEQ ID NO: 216 - DNA, 34 bp, Artificial Sequence
  Synthetic
  modified_base (7)..(7): methylated C nucleotide
  modified_base (11)..(11): methylated C nucleotide
  modified_base (16)..(16): methylated C nucleotide
  modified_base (21)..(21): methylated C nucleotide
  modified_base (25)..(25): methylated C nucleotide
  modified_base (27)..(27): methylated C nucleotide
gccacccgcccgctccgctgcgcccgcggggccc

SEQ ID NO: 217 - DNA, 36 bp, Artificial Sequence
  Synthetic
  modified_base (8)..(8): methylated C nucleotide
  modified_base (12)..(12): methylated C nucleotide
  modified_base (17)..(17): methylated C nucleotide
  modified_base (22)..(22): methylated C nucleotide
  modified_base (26)..(26): methylated C nucleotide
  modified_base (28)..(28): methylated C nucleotide
ggccacccgcccgctccgctgcgcccgcggggcccg

SEQ ID NO: 218 - DNA, 26 bp, Artificial Sequence
  Synthetic
  modified_base (8)..(8): methylated C nucleotide
  modified_base (10)..(10): methylated C nucleotide
  modified_base (15)..(15): methylated C nucleotide
  modified_base (20)..(20): methylated C nucleotide
  modified_base (24)..(24): methylated C nucleotide
  modified_base (26)..(26): methylated C nucleotide
ccacccgcccgctccgctgcgcccgc

SEQ ID NO: 219 - DNA, 26 bp, Artificial Sequence
  Synthetic
  modified_base (9)..(9): methylated C nucleotide
  modified_base (13)..(13): methylated C nucleotide
  modified_base (18)..(18): methylated C nucleotide
  modified_base (23)..(23): methylated C nucleotide
cggccacccgcccgctccgctgcgcc

SEQ ID NO: 220 - DNA, 26 bp, Artificial Sequence
  Synthetic
  modified_base (12)..(12): methylated C nucleotide
  modified_base (16)..(16): methylated C nucleotide
  modified_base (21)..(21): methylated C nucleotide
  modified_base (26)..(26): methylated C nucleotide
ggccggccacccgcccgctccgctgc

SEQ ID NO: 221 - DNA, 26 bp, Artificial Sequence
  Synthetic
  modified_base (15)..(15): methylated C nucleotide
  modified_base (19)..(19): methylated C nucleotide
  modified_base (24)..(24): methylated C nucleotide
ccgggccggccacccgcccgctccgc

SEQ ID NO: 222 - DNA, 26 bp, Artificial Sequence
  Synthetic
  modified_base (18)..(18): methylated C nucleotide
  modified_base (22)..(22): methylated C nucleotide
cctccgggccggccacccgcccgctc

SEQ ID NO: 223 - DNA, 26 bp, Artificial Sequence
  Synthetic
  modified_base (4)..(4): methylated C nucleotide
  modified_base (9)..(9): methylated C nucleotide
  modified_base (14)..(14): methylated C nucleotide
  modified_base (18)..(18): methylated C nucleotide
  modified_base (20)..(20): methylated C nucleotide
gcccgctccgctgcgcccgcggggcc

SEQ ID NO: 224 - DNA, 26 bp, Artificial Sequence
  Synthetic
  modified_base (1)..(1): methylated C nucleotide
  modified_base (6)..(6): methylated C nucleotide
  modified_base (11)..(11): methylated C nucleotide
  modified_base (15)..(15): methylated C nucleotide
  modified_base (17)..(17): methylated C nucleotide
cgctccgctgcgcccgcggggcccgg

SEQ ID NO: 225 - DNA, 26 bp, Artificial Sequence
  Synthetic
  modified_base (3)..(3): methylated C nucleotide
  modified_base (8)..(8): methylated C nucleotide
  modified_base (12)..(12): methylated C nucleotide
  modified_base (14)..(14): methylated C nucleotide
tccgctgcgcccgcggggcccggcca

SEQ ID NO: 226 - DNA, 26 bp, Artificial Sequence
  Synthetic
  modified_base (5)..(5): methylated C nucleotide
  modified_base (9)..(9): methylated C nucleotide
  modified_base (11)..(11): methylated C nucleotide
gctgcgcccgcggggcccggccagtg

SEQ ID NO: 227 - DNA, 26 bp, Artificial Sequence
  Synthetic
  modified_base (2)..(2): methylated C nucleotide
  modified_base (6)..(6): methylated C nucleotide
  modified_base (8)..(8): methylated C nucleotide
gcgcccgcggggcccggccagtgggt

SEQ ID NO: 228 - DNA, 24 bp, Artificial Sequence
  Synthetic
  modified_base (1)..(1): methylated C nucleotide
  modified_base (5)..(5): methylated C nucleotide
  modified_base (10)..(10): methylated C nucleotide
  modified_base (15)..(15): methylated C nucleotide
  modified_base (19)..(19): methylated C nucleotide
  modified_base (21)..(21): methylated C nucleotide
cgcccgctccgctgcgcccgcggg

SEQ ID NO: 229 - DNA, 22 bp, Artificial Sequence
  Synthetic
  modified_base (3)..(3): methylated C nucleotide
  modified_base (8)..(8): methylated C nucleotide
  modified_base (13)..(13): methylated C nucleotide
  modified_base (17)..(17): methylated C nucleotide
  modified_base (19)..(19): methylated C nucleotide
cccgctccgctgcgcccgcggg

SEQ ID NO: 230 - DNA, 20 bp, Artificial Sequence
  Synthetic
  modified_base (1)..(1): methylated C nucleotide
  modified_base (6)..(6): methylated C nucleotide
  modified_base (11)..(11): methylated C nucleotide
  modified_base (15)..(15): methylated C nucleotide
  modified_base (17)..(17): methylated C nucleotide
cgctccgctgcgcccgcggg

SEQ ID NO: 231 - DNA, 18 bp, Artificial Sequence
  Synthetic
  modified_base (4)..(4): methylated C nucleotide
  modified_base (9)..(9): methylated C nucleotide
  modified_base (13)..(13): methylated C nucleotide
  modified_base (15)..(15): methylated C nucleotide
ctccgctgcgcccgcggg

SEQ ID NO: 232 - DNA, 16 bp, Artificial Sequence
  Synthetic
  modified_base (2)..(2): methylated C nucleotide
  modified_base (7)..(7): methylated C nucleotide
  modified_base (11)..(11): methylated C nucleotide
  modified_base (13)..(13): methylated C nucleotide
ccgctgcgcccgcggg

SEQ ID NO: 233 - DNA, 15 bp, Artificial Sequence
  Synthetic
  modified_base (1)..(1): methylated C nucleotide
  modified_base (6)..(6): methylated C nucleotide
  modified_base (10)..(10): methylated C nucleotide
  modified_base (12)..(12): methylated C nucleotide
cgctgcgcccgcggg

SEQ ID NO: 234 - DNA, 24 bp, Artificial Sequence
  Synthetic
  modified_base (3)..(3): methylated C nucleotide
  modified_base (7)..(7): methylated C nucleotide
  modified_base (12)..(12): methylated C nucleotide
  modified_base (17)..(17): methylated C nucleotide
  modified_base (21)..(21): methylated C nucleotide
  modified_base (23)..(23): methylated C nucleotide
cccgcccgctccgctgcgcccgcg

SEQ ID NO: 235 - DNA, 22 bp, Artificial Sequence
  Synthetic
  modified_base (3)..(3): methylated C nucleotide
  modified_base (7)..(7): methylated C nucleotide
  modified_base (12)..(12): methylated C nucleotide
  modified_base (17)..(17): methylated C nucleotide
  modified_base (21)..(21): methylated C nucleotide
cccgcccgctccgctgcgcccg

SEQ ID NO: 236 - DNA, 20 bp, Artificial Sequence
  Synthetic
  modified_base (3)..(3): methylated C nucleotide
  modified_base (7)..(7): methylated C nucleotide
  modified_base (12)..(12): methylated C nucleotide
  modified_base (17)..(17): methylated C nucleotide
cccgcccgctccgctgcgcc

SEQ ID NO: 237 - DNA, 18 bp, Artificial Sequence
  Synthetic
  modified_base (3)..(3): methylated C nucleotide
  modified_base (7)..(7): methylated C nucleotide
  modified_base (12)..(12): methylated C nucleotide
  modified_base (17)..(17): methylated C nucleotide
cccgcccgctccgctgcg

SEQ ID NO: 238 - DNA, 16 bp, Artificial Sequence
  Synthetic
  modified_base (3)..(3): methylated C nucleotide
  modified_base (7)..(7): methylated C nucleotide
  modified_base (12)..(12): methylated C nucleotide
cccgcccgctccgctg

SEQ ID NO: 239 - DNA, 15 bp, Artificial Sequence
  Synthetic
  modified_base (3)..(3): methylated C nucleotide
  modified_base (7)..(7): methylated C nucleotide
  modified_base (12)..(12): methylated C nucleotide
cccgcccgctccgct

SEQ ID NO: 240 - DNA, 26 bp, Artificial Sequence
  Synthetic
  modified_base (3)..(3): methylated C nucleotide
  modified_base (7)..(7): methylated C nucleotide
  modified_base (12)..(12): methylated C nucleotide
  modified_base (17)..(17): methylated C nucleotide
  modified_base (21)..(21): methylated C nucleotide
  modified_base (23)..(23): methylated C nucleotide
cccgcccgccccgctgcgcccgcggg

SEQ ID NO: 241 - DNA, 26 bp, Artificial Sequence
  Synthetic
  modified_base (3)..(3): methylated C nucleotide
  modified_base (7)..(7): methylated C nucleotide
  modified_base (12)..(12): methylated C nucleotide
  modified_base (17)..(17): methylated C nucleotide
  modified_base (21)..(21): methylated C nucleotide
  modified_base (23)..(23): methylated C nucleotide
cccgtccgctccgctgcgcccgcggg

SEQ ID NO: 242 - DNA, 26 bp, Artificial Sequence
  Synthetic
  modified_base (3)..(3): methylated C nucleotide
  modified_base (7)..(7): methylated C nucleotide
  modified_base (12)..(12): methylated C nucleotide
  modified_base (17)..(17): methylated C nucleotide
  modified_base (21)..(21): methylated C nucleotide
  modified_base (23)..(23): methylated C nucleotide
cccgcccgctccgctgcggccgcggg

SEQ ID NO: 243 - DNA, 21 bp, Artificial Sequence
  Synthetic
  modified_base (3)..(3): methylated C nucleotide
  modified_base (5)..(5): methylated C nucleotide
  modified_base (7)..(7): methylated C nucleotide
  modified_base (13)..(13): methylated C nucleotide
  modified_base (18)..(18): methylated C nucleotide
ggcgcgcggggccgggccggg

SEQ ID NO: 244 - DNA, 22 bp, Artificial Sequence
  Synthetic
  modified_base (4)..(4): methylated C nucleotide
  modified_base (6)..(6): methylated C nucleotide
  modified_base (8)..(8): methylated C nucleotide
  modified_base (14)..(14): methylated C nucleotide
  modified_base (19)..(19): methylated C nucleotide
tggcgcgcggggccgggccggg

SEQ ID NO: 245 - DNA, 23 bp, Artificial Sequence
  Synthetic
  modified_base (5)..(5): methylated C nucleotide
  modified_base (7)..(7): methylated C nucleotide
  modified_base (9)..(9): methylated C nucleotide
  modified_base (15)..(15): methylated C nucleotide
  modified_base (20)..(20): methylated C nucleotide
atggcgcgcggggccgggccggg

SEQ ID NO: 246 - DNA, 24 bp, Artificial Sequence
  Synthetic
  modified_base (6)..(6): methylated C nucleotide
  modified_base (8)..(8): methylated C nucleotide
  modified_base (10)..(10): methylated C nucleotide
  modified_base (16)..(16): methylated C nucleotide
  modified_base (21)..(21): methylated C nucleotide
catggcgcgcggggccgggccggg

SEQ ID NO: 247 - DNA, 25 bp, Artificial Sequence
  Synthetic
  modified_base (7)..(7): methylated C nucleotide
  modified_base (9)..(9): methylated C nucleotide
  modified_base (11)..(11): methylated C nucleotide
  modified_base (17)..(17): methylated C nucleotide
  modified_base (22)..(22): methylated C nucleotide
acatggcgcgcggggccgggccggg

SEQ ID NO: 248 - DNA, 26 bp, Artificial Sequence
  Synthetic
  modified_base (8)..(8): methylated C nucleotide
  modified_base (10)..(10): methylated C nucleotide
  modified_base (12)..(12): methylated C nucleotide
  modified_base (18)..(18): methylated C nucleotide
  modified_base (23)..(23): methylated C nucleotide
cacatggcgcgcggggccgggccggg

SEQ ID NO: 249 - DNA, 22 bp, Artificial Sequence
  Synthetic
  modified_base (3)..(3): methylated C nucleotide
  modified_base (5)..(5): methylated C nucleotide
  modified_base (7)..(7): methylated C nucleotide
  modified_base (13)..(13): methylated C nucleotide
  modified_base (18)..(18): methylated C nucleotide
ggcgcgcggggccgggccgggg

SEQ ID NO: 250 - DNA, 23 bp, Artificial Sequence
  Synthetic
  modified_base (3)..(3): methylated C nucleotide
  modified_base (5)..(5): methylated C nucleotide
  modified_base (7)..(7): methylated C nucleotide
  modified_base (13)..(13): methylated C nucleotide
  modified_base (18)..(18): methylated C nucleotide
ggcgcgcggggccgggccgggga

SEQ ID NO: 251 - DNA, 24 bp, Artificial Sequence
  Synthetic
  modified_base (3)..(3): methylated C nucleotide
  modified_base (5)..(5): methylated C nucleotide
  modified_base (7)..(7): methylated C nucleotide
  modified_base (13)..(13): methylated C nucleotide
  modified_base (18)..(18): methylated C nucleotide
ggcgcgcggggccgggccggggag

SEQ ID NO: 252 - DNA, 25 bp, Artificial Sequence
  Synthetic
  modified_base (3)..(3): methylated C nucleotide
  modified_base (5)..(5): methylated C nucleotide
  modified_base (7)..(7): methylated C nucleotide
  modified_base (13)..(13): methylated C nucleotide
  modified_base (18)..(18): methylated C nucleotide
ggcgcgcggggccgggccggggagg

SEQ ID NO: 253 - DNA, 26 bp, Artificial Sequence
  Synthetic
  modified_base (3)..(3): methylated C nucleotide
  modified_base (5)..(5): methylated C nucleotide
  modified_base (7)..(7): methylated C nucleotide
  modified_base (13)..(13): methylated C nucleotide
  modified_base (18)..(18): methylated C nucleotide
ggcgcgcggggccgggccggggaggg

SEQ ID NO: 254 - DNA, 23 bp, Artificial Sequence
  Synthetic
  modified_base (4)..(4): methylated C nucleotide
  modified_base (6)..(6): methylated C nucleotide
  modified_base (8)..(8): methylated C nucleotide
  modified_base (14)..(14): methylated C nucleotide
  modified_base (19)..(19): methylated C nucleotide
tggcgcgcggggccgggccgggg

SEQ ID NO: 255 - DNA, 25 bp, Artificial Sequence
  Synthetic
  modified_base (5)..(5): methylated C nucleotide
  modified_base (7)..(7): methylated C nucleotide
  modified_base (9)..(9): methylated C nucleotide
  modified_base (15)..(15): methylated C nucleotide
  modified_base (20)..(20): methylated C nucleotide
atggcgcgcggggccgggccgggga

SEQ ID NO: 256 - DNA, 27 bp, Artificial Sequence
  Synthetic
  modified_base (6)..(6): methylated C nucleotide
  modified_base (8)..(8): methylated C nucleotide
  modified_base (10)..(10): methylated C nucleotide
  modified_base (16)..(16): methylated C nucleotide
  modified_base (21)..(21): methylated C nucleotide
catggcgcgcggggccgggccggggag

SEQ ID NO: 257 - DNA, 29 bp, Artificial Sequence
  Synthetic
  modified_base (7)..(7): methylated C nucleotide
  modified_base (9)..(9): methylated C nucleotide
  modified_base (11)..(11): methylated C nucleotide
  modified_base (17)..(17): methylated C nucleotide
  modified_base (22)..(22): methylated C nucleotide
acatggcgcgcggggccgggccggggagg

SEQ ID NO: 258 - DNA, 31 bp, Artificial Sequence
  Synthetic
  modified_base (8)..(8): methylated C nucleotide
  modified_base (10)..(10): methylated C nucleotide
  modified_base (12)..(12): methylated C nucleotide
  modified_base (18)..(18): methylated C nucleotide
  modified_base (23)..(23): methylated C nucleotide
cacatggcgcgcggggccgggccggggaggg

SEQ ID NO: 259 - DNA, 21 bp, Artificial Sequence
  Synthetic
  modified_base (6)..(6): methylated C nucleotide
  modified_base (8)..(8): methylated C nucleotide
  modified_base (10)..(10): methylated C nucleotide
  modified_base (16)..(16): methylated C nucleotide
  modified_base (21)..(21): methylated C nucleotide
catggcgcgcggggccgggcc

SEQ ID NO: 260 - DNA, 21 bp, Artificial Sequence
  Synthetic
  modified_base (9)..(9): methylated C nucleotide
  modified_base (11)..(11): methylated C nucleotide
  modified_base (13)..(13): methylated C nucleotide
  modified_base (19)..(19): methylated C nucleotide
gcacatggcgcgcggggccgg

SEQ ID NO: 261 - DNA, 21 bp, Artificial Sequence
  Synthetic
  modified_base (12)..(12): methylated C nucleotide
  modified_base (14)..(14): methylated C nucleotide
  modified_base (16)..(16): methylated C nucleotide
ggggcacatggcgcgcggggc

SEQ ID NO: 262 - DNA, 21 bp, Artificial Sequence
  Synthetic
  modified_base (15)..(15): methylated C nucleotide
  modified_base (17)..(17): methylated C nucleotide
  modified_base (19)..(19): methylated C nucleotide
ccgggggcacatggcgcgcgg

SEQ ID NO: 263 - DNA, 21 bp, Artificial Sequence
  Synthetic
  modified_base (18)..(18): methylated C nucleotide
  modified_base (20)..(20): methylated C nucleotide
ggcccgggggcacatggcgcg

SEQ ID NO: 264 - DNA, 21 bp, Artificial Sequence
  Synthetic
  modified_base (2)..(2): methylated C nucleotide
  modified_base (4)..(4): methylated C nucleotide
  modified_base (10)..(10): methylated C nucleotide
  modified_base (15)..(15): methylated C nucleotide
gcgcggggccgggccggggag

SEQ ID NO: 265 - DNA, 21 bp, Artificial Sequence
  Synthetic
  modified_base (1)..(1): methylated C nucleotide
  modified_base (7)..(7): methylated C nucleotide
  modified_base (12)..(12): methylated C nucleotide
cggggccgggccggggagggc

SEQ ID NO: 266 - DNA, 21 bp, Artificial Sequence
  Synthetic
  modified_base (4)..(4): methylated C nucleotide
  modified_base (9)..(9): methylated C nucleotide
ggccgggccggggagggcgcc

SEQ ID NO: 267 - DNA, 21 bp, Artificial Sequence
  Synthetic
  modified_base (1)..(1): methylated C nucleotide
  modified_base (6)..(6): methylated C nucleotide
cgggccggggagggcgcctcc

SEQ ID NO: 268 - DNA, 21 bp, Artificial Sequence
  Synthetic
  modified_base (3)..(3): methylated C nucleotide
gccggggagggcgcctccggg

SEQ ID NO: 269 - DNA, 19 bp, Artificial Sequence
  Synthetic
  modified_base (1)..(1): methylated C nucleotide
  modified_base (3)..(3): methylated C nucleotide
  modified_base (5)..(5): methylated C nucleotide
  modified_base (11)..(11): methylated C nucleotide
  modified_base (16)..(16): methylated C nucleotide
cgcgcggggccgggccggg

SEQ ID NO: 270 - DNA, 17 bp, Artificial Sequence
  Synthetic
  modified_base (1)..(1): methylated C nucleotide
  modified_base (3)..(3): methylated C nucleotide
  modified_base (9)..(9): methylated C nucleotide
  modified_base (14)..(14): methylated C nucleotide
cgcggggccgggccggg

SEQ ID NO: 271 - DNA, 15 bp, Artificial Sequence
  Synthetic
  modified_base (1)..(1): methylated C nucleotide
  modified_base (7)..(7): methylated C nucleotide
  modified_base (12)..(12): methylated C nucleotide
cggggccgggccggg

SEQ ID NO: 272 - DNA, 19 bp, Artificial Sequence
  Synthetic
  modified_base (3)..(3): methylated C nucleotide
  modified_base (5)..(5): methylated C nucleotide
  modified_base (7)..(7): methylated C nucleotide
  modified_base (13)..(13): methylated C nucleotide
  modified_base (18)..(18): methylated C nucleotide
ggcgcgcggggccgggccg

SEQ ID NO: 273 - DNA, 17 bp, Artificial Sequence
  Synthetic
  modified_base (3)..(3): methylated C nucleotide
  modified_base (5)..(5): methylated C nucleotide
  modified_base (7)..(7): methylated C nucleotide
  modified_base (13)..(13): methylated C nucleotide
ggcgcgcggggccgggc

SEQ ID NO: 274 - DNA, 15 bp, Artificial Sequence
  Synthetic
  modified_base (3)..(3): methylated C nucleotide
  modified_base (5)..(5): methylated C nucleotide
  modified_base (7)..(7): methylated C nucleotide
  modified_base (13)..(13): methylated C nucleotide
ggcgcgcggggccgg

SEQ ID NO: 275 - DNA, 21 bp, Artificial Sequence
  Synthetic
  modified_base (3)..(3): methylated C nucleotide
  modified_base (5)..(5): methylated C nucleotide
  modified_base (7)..(7): methylated C nucleotide
  modified_base (13)..(13): methylated C nucleotide
  modified_base (18)..(18): methylated C nucleotide
ggcgcacggggccgggccggg

SEQ ID NO: 276 - DNA, 21 bp, Artificial Sequence
  Synthetic
  modified_base (3)..(3): methylated C nucleotide
  modified_base (5)..(5): methylated C nucleotide
  modified_base (7)..(7): methylated C nucleotide
  modified_base (13)..(13): methylated C nucleotide
  modified_base (18)..(18): methylated C nucleotide
ggcgcgcggggccggtccggg

SEQ ID NO: 277 - DNA, 21 bp, Artificial Sequence
  Synthetic
  modified_base (3)..(3): methylated C nucleotide
  modified_base (5)..(5): methylated C nucleotide
  modified_base (7)..(7): methylated C nucleotide
  modified_base (13)..(13): methylated C nucleotide
  modified_base (18)..(18): methylated C nucleotide
ggcgcgccgggccgggccggg

SEQ ID NO: 278 - DNA, 27 bp, Artificial Sequence
  Synthetic
  modified_base (7)..(7): methylated C nucleotide
  modified_base (9)..(9): methylated C nucleotide
  modified_base (11)..(11): methylated C nucleotide
  modified_base (17)..(17): methylated C nucleotide
  modified_base (22)..(22): methylated C nucleotide
acatggcgcgcggggccgggccgggga

SEQ ID NO: 279 - DNA, 28 bp, Artificial Sequence
  Synthetic
  modified_base (8)..(8): methylated C nucleotide
  modified_base (10)..(10): methylated C nucleotide
  modified_base (12)..(12): methylated C nucleotide
  modified_base (18)..(18): methylated C nucleotide
  modified_base (23)..(23): methylated C nucleotide
cacatggcgcgcggggccgggccgggga

SEQ ID NO: 280 - DNA, 29 bp, Artificial Sequence
  Synthetic
  modified_base (9)..(9): methylated C nucleotide
  modified_base (11)..(11): methylated C nucleotide
  modified_base (13)..(13): methylated C nucleotide
  modified_base (19)..(19): methylated C nucleotide
  modified_base (24)..(24): methylated C nucleotide
gcacatggcgcgcggggccgggccgggga

SEQ ID NO: 281 - DNA, 30 bp, Artificial Sequence
  Synthetic
  modified_base (10)..(10): methylated C nucleotide
  modified_base (12)..(12): methylated C nucleotide
  modified_base (14)..(14): methylated C nucleotide
  modified_base (20)..(20): methylated C nucleotide
  modified_base (25)..(25): methylated C nucleotide
ggcacatggcgcgcggggccgggccgggga

SEQ ID NO: 282 - DNA, 31 bp, Artificial Sequence
  Synthetic
  modified_base (11)..(11): methylated C nucleotide
  modified_base (13)..(13): methylated C nucleotide
  modified_base (15)..(15): methylated C nucleotide
  modified_base (21)..(21): methylated C nucleotide
  modified_base (26)..(26): methylated C nucleotide
gggcacatggcgcgcggggccgggccgggga

SEQ ID NO: 283 - DNA, 32 bp, Artificial Sequence
  Synthetic
  modified_base (12)..(12): methylated C nucleotide
  modified_base (14)..(14): methylated C nucleotide
  modified_base (16)..(16): methylated C nucleotide
  modified_base (22)..(22): methylated C nucleotide
  modified_base (27)..(27): methylated C nucleotide
ggggcacatggcgcgcggggccgggccgggga

SEQ ID NO: 284 - DNA, 28 bp, Artificial Sequence
  Synthetic
  modified_base (7)..(7): methylated C nucleotide
  modified_base (9)..(9): methylated C nucleotide
  modified_base (11)..(11): methylated C nucleotide
  modified_base (17)..(17): methylated C nucleotide
  modified_base (22)..(22): methylated C nucleotide
acatggcgcgcggggccgggccggggag

SEQ ID NO: 285 - DNA, 29 bp, Artificial Sequence
  Synthetic
  modified_base (7)..(7): methylated C nucleotide
  modified_base (9)..(9): methylated C nucleotide
  modified_base (11)..(11): methylated C nucleotide
  modified_base (17)..(17): methylated C nucleotide
  modified_base (22)..(22): methylated C nucleotide
acatggcgcgcggggccgggccggggagg

SEQ ID NO: 286 - DNA, 30 bp, Artificial Sequence
  Synthetic
  modified_base (7)..(7): methylated C nucleotide
  modified_base (9)..(9): methylated C nucleotide
  modified_base (11)..(11): methylated C nucleotide
  modified_base (17)..(17): methylated C nucleotide
  modified_base (22)..(22): methylated C nucleotide
acatggcgcgcggggccgggccggggaggg

SEQ ID NO: 287 - DNA, 31 bp, Artificial Sequence
  Synthetic
  modified_base (7)..(7): methylated C nucleotide
  modified_base (9)..(9): methylated C nucleotide
  modified_base (11)..(11): methylated C nucleotide
  modified_base (17)..(17): methylated C nucleotide
  modified_base (22)..(22): methylated C nucleotide
acatggcgcgcggggccgggccggggagggc

SEQ ID NO: 288 - DNA, 32 bp, Artificial Sequence
  Synthetic
  modified_base (7)..(7): methylated C nucleotide
  modified_base (9)..(9): methylated C nucleotide
  modified_base (11)..(11): methylated C nucleotide
  modified_base (17)..(17): methylated C nucleotide
  modified_base (22)..(22): methylated C nucleotide
acatggcgcgcggggccgggccggggagggcg

SEQ ID NO: 289 - DNA, 29 bp, Artificial Sequence
  Synthetic
  modified_base (8)..(8): methylated C nucleotide
  modified_base (10)..(10): methylated C nucleotide
  modified_base (12)..(12): methylated C nucleotide
  modified_base (18)..(18): methylated C nucleotide
  modified_base (23)..(23): methylated C nucleotide
cacatggcgcgcggggccgggccggggag

SEQ ID NO: 290 - DNA, 31 bp, Artificial Sequence
  Synthetic
  modified_base (9)..(9): methylated C nucleotide
  modified_base (11)..(11): methylated C nucleotide
  modified_base (13)..(13): methylated C nucleotide
  modified_base (19)..(19): methylated C nucleotide
  modified_base (24)..(24): methylated C nucleotide
gcacatggcgcgcggggccgggccggggagg

SEQ ID NO: 291 - DNA, 33 bp, Artificial Sequence
  Synthetic
  modified_base (10)..(10): methylated C nucleotide
  modified_base (12)..(12): methylated C nucleotide
  modified_base (14)..(14): methylated C nucleotide
  modified_base (20)..(20): methylated C nucleotide
  modified_base (25)..(25): methylated C nucleotide
ggcacatggcgcgcggggccgggccggggaggg

SEQ ID NO: 292 - DNA, 35 bp, Artificial Sequence
  Synthetic
  modified_base (11)..(11): methylated C nucleotide
  modified_base (13)..(13): methylated C nucleotide
  modified_base (15)..(15): methylated C nucleotide
  modified_base (21)..(21): methylated C nucleotide
  modified_base (26)..(26): methylated C nucleotide
gggcacatggcgcgcggggccgggccggggagggc

SEQ ID NO: 293 - DNA, 37 bp, Artificial Sequence
  Synthetic
  modified_base (12)..(12): methylated C nucleotide
  modified_base (14)..(14): methylated C nucleotide
  modified_base (16)..(16): methylated C nucleotide
  modified_base (22)..(22): methylated C nucleotide
  modified_base (27)..(27): methylated C nucleotide
ggggcacatggcgcgcggggccgggccggggagggcg

SEQ ID NO: 294 - DNA, 27 bp, Artificial Sequence
  Synthetic
  modified_base (10)..(10): methylated C nucleotide
  modified_base (12)..(12): methylated C nucleotide
  modified_base (14)..(14): methylated C nucleotide
  modified_base (20)..(20): methylated C nucleotide
  modified_base (25)..(25): methylated C nucleotide
ggcacatggcgcgcggggccgggccgg

SEQ ID NO: 295 - DNA, 27 bp, Artificial Sequence
  Synthetic
  modified_base (13)..(13): methylated C nucleotide
  modified_base (15)..(15): methylated C nucleotide
  modified_base (17)..(17): methylated C nucleotide
  modified_base (23)..(23): methylated C nucleotide
gggggcacatggcgcgcggggccgggc

SEQ ID NO: 296 - DNA, 27 bp, Artificial Sequence
  Synthetic
  modified_base (16)..(16): methylated C nucleotide
  modified_base (18)..(18): methylated C nucleotide
  modified_base (20)..(20): methylated C nucleotide
  modified_base (26)..(26): methylated C nucleotide
gccgggggcacatggcgcgcggggccg

SEQ ID NO: 297 - DNA, 27 bp, Artificial Sequence
  Synthetic
  modified_base (19)..(19): methylated C nucleotide
  modified_base (21)..(21): methylated C nucleotide
  modified_base (23)..(23): methylated C nucleotide
cccgccgggggcacatggcgcgcgggg

SEQ ID NO: 298 - DNA, 27 bp, Artificial Sequence
  Synthetic
  modified_base (22)..(22): methylated C nucleotide
  modified_base (24)..(24): methylated C nucleotide
  modified_base (26)..(26): methylated C nucleotide
cgtcccgccgggggcacatggcgcgcg

SEQ ID NO: 299 - DNA, 27 bp, Artificial Sequence
  Synthetic
  modified_base (4)..(4): methylated C nucleotide
  modified_base (6)..(6): methylated C nucleotide
  modified_base (8)..(8): methylated C nucleotide
  modified_base (14)..(14): methylated C nucleotide
  modified_base (19)..(19): methylated C nucleotide
tggcgcgcggggccgggccggggaggg

SEQ ID NO: 300 - DNA, 27 bp, Artificial Sequence
  Synthetic
  modified_base (1)..(1): methylated C nucleotide
  modified_base (3)..(3): methylated C nucleotide
  modified_base (5)..(5): methylated C nucleotide
  modified_base (11)..(11): methylated C nucleotide
  modified_base (16)..(16): methylated C nucleotide
cgcgcggggccgggccggggagggcgc

SEQ ID NO: 301 - DNA, 27 bp, Artificial Sequence
  Synthetic
  modified_base (2)..(2): methylated C nucleotide
  modified_base (8)..(8): methylated C nucleotide
  modified_base (13)..(13): methylated C nucleotide
gcggggccgggccggggagggcgcctc

SEQ ID NO: 302 - DNA, 27 bp, Artificial Sequence
  Synthetic
  modified_base (5)..(5): methylated C nucleotide
  modified_base (10)..(10): methylated C nucleotide
gggccgggccggggagggcgcctccgg

SEQ ID NO: 303 - DNA, 27 bp, Artificial Sequence
  Synthetic
  modified_base (2)..(2): methylated C nucleotide
  modified_base (7)..(7): methylated C nucleotide
ccgggccggggagggcgcctccgggcc

SEQ ID NO: 304 - DNA, 25 bp, Artificial Sequence
  Synthetic
  modified_base (5)..(5): methylated C nucleotide
  modified_base (7)..(7): methylated C nucleotide
  modified_base (9)..(9): methylated C nucleotide
  modified_base (15)..(15): methylated C nucleotide
  modified_base (20)..(20): methylated C nucleotide
atggcgcgcggggccgggccgggga

SEQ ID NO: 305 - DNA, 23 bp, Artificial Sequence
  Synthetic
  modified_base (3)..(3): methylated C nucleotide
  modified_base (5)..(5): methylated C nucleotide
  modified_base (7)..(7): methylated C nucleotide
  modified_base (13)..(13): methylated C nucleotide
  modified_base (18)..(18): methylated C nucleotide
ggcgcgcggggccgggccgggga

SEQ ID NO: 306 - DNA, 21 bp, Artificial Sequence
  Synthetic
  modified_base (1)..(1): methylated C nucleotide
  modified_base (3)..(3): methylated C nucleotide
  modified_base (5)..(5): methylated C nucleotide
  modified_base (11)..(11): methylated C nucleotide
  modified_base (16)..(16): methylated C nucleotide
cgcgcggggccgggccgggga

SEQ ID NO: 307 - DNA, 19 bp, Artificial Sequence
  Synthetic
  modified_base (1)..(1): methylated C nucleotide
  modified_base (3)..(3): methylated C nucleotide
  modified_base (9)..(9): methylated C nucleotide
  modified_base (14)..(14): methylated C nucleotide
cgcggggccgggccgggga

SEQ ID NO: 308 - DNA, 17 bp, Artificial Sequence
  Synthetic
  modified_base (1)..(1): methylated C nucleotide
  modified_base (7)..(7): methylated C nucleotide
  modified_base (12)..(12): methylated C nucleotide
cggggccgggccgggga

SEQ ID NO: 309 - DNA, 15 bp, Artificial Sequence
  Synthetic
  modified_base (5)..(5): methylated C nucleotide
  modified_base (10)..(10): methylated C nucleotide
gggccgggccgggga

SEQ ID NO: 310 - DNA, 25 bp, Artificial Sequence
  Synthetic
  modified_base (7)..(7): methylated C nucleotide
  modified_base (9)..(9): methylated C nucleotide
  modified_base (11)..(11): methylated C nucleotide
  modified_base (17)..(17): methylated C nucleotide
  modified_base (22)..(22): methylated C nucleotide
acatggcgcgcggggccgggccggg

SEQ ID NO: 311 - DNA, 23 bp, Artificial Sequence
  Synthetic
  modified_base (7)..(7): methylated C nucleotide
  modified_base (9)..(9): methylated C nucleotide
  modified_base (11)..(11): methylated C nucleotide
  modified_base (17)..(17): methylated C nucleotide
  modified_base (22)..(22): methylated C nucleotide
acatggcgcgcggggccgggccg

SEQ ID NO: 312 - DNA, 21 bp, Artificial Sequence
  Synthetic
  modified_base (7)..(7): methylated C nucleotide
  modified_base (9)..(9): methylated C nucleotide
  modified_base (11)..(11): methylated C nucleotide
  modified_base (17)..(17): methylated C nucleotide
acatggcgcgcggggccgggc

SEQ ID NO: 313 - DNA, 19 bp, Artificial Sequence
  Synthetic
  modified_base (7)..(7): methylated C nucleotide
  modified_base (9)..(9): methylated C nucleotide
  modified_base (11)..(11): methylated C nucleotide
  modified_base (17)..(17): methylated C nucleotide
acatggcgcgcggggccgg

SEQ ID NO: 314 - DNA, 17 bp, Artificial Sequence
  Synthetic
  modified_base (7)..(7): methylated C nucleotide
  modified_base (9)..(9): methylated C nucleotide
  modified_base (11)..(11): methylated C nucleotide
  modified_base (17)..(17): methylated C nucleotide
acatggcgcgcggggcc

SEQ ID NO: 315 - DNA, 15 bp, Artificial Sequence
  Synthetic
  modified_base (7)..(7): methylated C nucleotide
  modified_base (9)..(9): methylated C nucleotide
  modified_base (11)..(11): methylated C nucleotide
acatggcgcgcgggg

SEQ ID NO: 316 - DNA, 27 bp, Artificial Sequence
  Synthetic
  modified_base (7)..(7): methylated C nucleotide
  modified_base (9)..(9): methylated C nucleotide
  modified_base (11)..(11): methylated C nucleotide
  modified_base (17)..(17): methylated C nucleotide
  modified_base (22)..(22): methylated C nucleotide
acatggctcgcggggccgggccgggga

SEQ ID NO: 317 - DNA, 27 bp, Artificial Sequence
  Synthetic
  modified_base (7)..(7): methylated C nucleotide
  modified_base (9)..(9): methylated C nucleotide
  modified_base (11)..(11): methylated C nucleotide
  modified_base (17)..(17): methylated C nucleotide
  modified_base (22)..(22): methylated C nucleotide
acatggcgcgcggggccggcccgggga

SEQ ID NO: 318 - DNA, 27 bp, Artificial Sequence
  Synthetic
  modified_base (7)..(7): methylated C nucleotide
  modified_base (9)..(9): methylated C nucleotide
  modified_base (11)..(11): methylated C nucleotide
  modified_base (17)..(17): methylated C nucleotide
  modified_base (22)..(22): methylated C nucleotide
acatggcgcacggggccgggccgggga

SEQ ID NO: 319 - DNA, 26 bp, Artificial Sequence
  Synthetic
  modified_base (3)..(3): methylated C nucleotide
  modified_base (19)..(19): methylated C nucleotide
  modified_base (21)..(21): methylated C nucleotide
  modified_base (23)..(23): methylated C nucleotide
gccgcattgaattaactacgcgcgcc

SEQ ID NO: 320 - DNA, 27 bp, Artificial Sequence
  Synthetic
  modified_base (4)..(4): methylated C nucleotide
  modified_base (20)..(20): methylated C nucleotide
  modified_base (22)..(22): methylated C nucleotide
  modified_base (24)..(24): methylated C nucleotide
agccgcattgaattaactacgcgcgcc

SEQ ID NO: 321 - DNA, 28 bp, Artificial Sequence
  Synthetic
  modified_base (5)..(5): methylated C nucleotide
  modified_base (21)..(21): methylated C nucleotide
  modified_base (23)..(23): methylated C nucleotide
  modified_base (25)..(25): methylated C nucleotide
gagccgcattgaattaactacgcgcgcc

SEQ ID NO: 322 - DNA, 29 bp, Artificial Sequence
  Synthetic
  modified_base (6)..(6): methylated C nucleotide
  modified_base (22)..(22): methylated C nucleotide
  modified_base (24)..(24): methylated C nucleotide
  modified_base (26)..(26): methylated C nucleotide
agagccgcattgaattaactacgcgcgcc

SEQ ID NO: 323 - DNA, 30 bp, Artificial Sequence
  Synthetic
  modified_base (7)..(7): methylated C nucleotide
  modified_base (23)..(23): methylated C nucleotide
  modified_base (25)..(25): methylated C nucleotide
  modified_base (27)..(27): methylated C nucleotide
gagagccgcattgaattaactacgcgcgcc

SEQ ID NO: 324 - DNA, 31 bp, Artificial Sequence
  Synthetic
  modified_base (8)..(8): methylated C nucleotide
  modified_base (24)..(24): methylated C nucleotide
  modified_base (26)..(26): methylated C nucleotide
  modified_base (28)..(28): methylated C nucleotide
agagagccgcattgaattaactacgcgcgcc

SEQ ID NO: 325 - DNA, 27 bp, Artificial Sequence
  Synthetic
  modified_base (3)..(3): methylated C nucleotide
  modified_base (19)..(19): methylated C nucleotide
  modified_base (21)..(21): methylated C nucleotide
  modified_base (23)..(23): methylated C nucleotide
gccgcattgaattaactacgcgcgcct

SEQ ID NO: 326 - DNA, 28 bp, Artificial Sequence
  Synthetic
  modified_base (3)..(3): methylated C nucleotide
  modified_base (19)..(19): methylated C nucleotide
  modified_base (21)..(21): methylated C nucleotide
  modified_base (23)..(23): methylated C nucleotide
gccgcattgaattaactacgcgcgccta

SEQ ID NO: 327 - DNA, 29 bp, Artificial Sequence
  Synthetic
  modified_base (3)..(3): methylated C nucleotide
  modified_base (19)..(19): methylated C nucleotide
  modified_base (21)..(21): methylated C nucleotide
  modified_base (23)..(23): methylated C nucleotide
gccgcattgaattaactacgcgcgcctac

SEQ ID NO: 328 - DNA, 30 bp, Artificial Sequence
  Synthetic
  modified_base (3)..(3): methylated C nucleotide
  modified_base (19)..(19): methylated C nucleotide
  modified_base (21)..(21): methylated C nucleotide
  modified_base (23)..(23): methylated C nucleotide
gccgcattgaattaactacgcgcgcctacc

SEQ ID NO: 329 - DNA, 31 bp, Artificial Sequence
  Synthetic
  modified_base (3)..(3): methylated C nucleotide
  modified_base (19)..(19): methylated C nucleotide
  modified_base (21)..(21): methylated C nucleotide
  modified_base (23)..(23): methylated C nucleotide
gccgcattgaattaactacgcgcgcctacca

SEQ ID NO: 330 - DNA, 28 bp, Artificial Sequence
  Synthetic
  modified_base (4)..(4): methylated C nucleotide
  modified_base (20)..(20): methylated C nucleotide
  modified_base (22)..(22): methylated C nucleotide
  modified_base (24)..(24): methylated C nucleotide
agccgcattgaattaactacgcgcgcct

SEQ ID NO: 331 - DNA, 30 bp, Artificial Sequence
  Synthetic
  modified_base (5)..(5): methylated C nucleotide
  modified_base (21)..(21): methylated C nucleotide
  modified_base (23)..(23): methylated C nucleotide
  modified_base (25)..(25): methylated C nucleotide
gagccgcattgaattaactacgcgcgccta

SEQ ID NO: 332 - DNA, 32 bp, Artificial Sequence
  Synthetic
  modified_base (6)..(6): methylated C nucleotide
  modified_base (22)..(22): methylated C nucleotide
  modified_base (24)..(24): methylated C nucleotide
  modified_base (26)..(26): methylated C nucleotide
agagccgcattgaattaactacgcgcgcctac

SEQ ID NO: 333 - DNA, 34 bp, Artificial Sequence
  Synthetic
  modified_base (7)..(7): methylated C nucleotide
  modified_base (23)..(23): methylated C nucleotide
  modified_base (25)..(25): methylated C nucleotide
  modified_base (27)..(27): methylated C nucleotide
gagagccgcattgaattaactacgcgcgcctacc

SEQ ID NO: 334 - DNA, 36 bp, Artificial Sequence
  Synthetic
  modified_base (8)..(8): methylated C nucleotide
  modified_base (24)..(24): methylated C nucleotide
  modified_base (26)..(26): methylated C nucleotide
  modified_base (28)..(28): methylated C nucleotide
agagagccgcattgaattaactacgcgcgcctacca

SEQ ID NO: 335 - DNA, 26 bp, Artificial Sequence
  Synthetic
  modified_base (6)..(6): methylated C nucleotide
  modified_base (22)..(22): methylated C nucleotide
  modified_base (24)..(24): methylated C nucleotide
  modified_base (26)..(26): methylated C nucleotide
agagccgcattgaattaactacgcgc

SEQ ID NO: 336 - DNA, 26 bp, Artificial Sequence
  Synthetic
  modified_base (9)..(9): methylated C nucleotide
  modified_base (25)..(25): methylated C nucleotide
aagagagccgcattgaattaactacg

SEQ ID NO: 337 - DNA, 26 bp, Artificial Sequence
  Synthetic
  modified_base (12)..(12): methylated C nucleotide
agtaagagagccgcattgaattaact

SEQ ID NO: 338 - DNA, 26 bp, Artificial Sequence
  Synthetic
  modified_base (15)..(15): methylated C nucleotide
cagagtaagagagccgcattgaatta

SEQ ID NO: 339 - DNA, 26 bp, Artificial Sequence
  Synthetic
  modified_base (18)..(18): methylated C nucleotide
aaacagagtaagagagccgcattgaa

SEQ ID NO: 340 - DNA, 26 bp, Artificial Sequence
  Synthetic
  modified_base (16)..(16): methylated C nucleotide
  modified_base (18)..(18): methylated C nucleotide
  modified_base (20)..(20): methylated C nucleotide
gcattgaattaactacgcgcgcctac

SEQ ID NO: 341 - DNA, 26 bp, Artificial Sequence
  Synthetic
  modified_base (13)..(13): methylated C nucleotide
  modified_base (15)..(15): methylated C nucleotide
  modified_base (17)..(17): methylated C nucleotide
ttgaattaactacgcgcgcctaccat

SEQ ID NO: 342 - DNA, 26 bp, Artificial Sequence
  Synthetic
  modified_base (10)..(10): methylated C nucleotide
  modified_base (12)..(12): methylated C nucleotide
  modified_base (14)..(14): methylated C nucleotide
aattaactacgcgcgcctaccatttt

SEQ ID NO: 343 - DNA, 26 bp, Artificial Sequence
  Synthetic
  modified_base (7)..(7): methylated C nucleotide
  modified_base (9)..(9): methylated C nucleotide
  modified_base (11)..(11): methylated C nucleotide
taactacgcgcgcctaccattttctt

SEQ ID NO: 344 - DNA, 26 bp, Artificial Sequence
  Synthetic
  modified_base (4)..(4): methylated C nucleotide
  modified_base (6)..(6): methylated C nucleotide
  modified_base (8)..(8): methylated C nucleotide
ctacgcgcgcctaccattttcttttg

SEQ ID NO: 345 - DNA, 24 bp, Artificial Sequence
  Synthetic
  modified_base (1)..(1): methylated C nucleotide
  modified_base (17)..(17): methylated C nucleotide
  modified_base (19)..(19): methylated C nucleotide
  modified_base (21)..(21): methylated C nucleotide
cgcattgaattaactacgcgcgcc

SEQ ID NO: 346 - DNA, 22 bp, Artificial Sequence
  Synthetic
  modified_base (15)..(15): methylated C nucleotide
  modified_base (17)..(17): methylated C nucleotide
  modified_base (19)..(19): methylated C nucleotide
cattgaattaactacgcgcgcc

SEQ ID NO: 347 - DNA, 20 bp, Artificial Sequence
  Synthetic
  modified_base (13)..(13): methylated C nucleotide
  modified_base (15)..(15): methylated C nucleotide
  modified_base (17)..(17): methylated C nucleotide
ttgaattaactacgcgcgcc

SEQ ID NO: 348 - DNA, 18 bp, Artificial Sequence
  Synthetic
  modified_base (11)..(11): methylated C nucleotide
  modified_base (13)..(13): methylated C nucleotide
  modified_base (15)..(15): methylated C nucleotide
gaattaactacgcgcgcc

SEQ ID NO: 349 - DNA, 16 bp, Artificial Sequence
  Synthetic
  modified_base (9)..(9): methylated C nucleotide
  modified_base (11)..(11): methylated C nucleotide
  modified_base (13)..(13): methylated C nucleotide
attaactacgcgcgcc

SEQ ID NO: 350 - DNA, 15 bp, Artificial Sequence
  Synthetic
  modified_base (8)..(8): methylated C nucleotide
  modified_base (10)..(10): methylated C nucleotide
  modified_base (12)..(12): methylated C nucleotide
ttaactacgcgcgcc

SEQ ID NO: 351 - DNA, 24 bp, Artificial Sequence
  Synthetic
  modified_base (3)..(3): methylated C nucleotide
  modified_base (19)..(19): methylated C nucleotide
  modified_base (21)..(21): methylated C nucleotide
  modified_base (23)..(23): methylated C nucleotide
gccgcattgaattaactacgcgcg

SEQ ID NO: 352 - DNA, 22 bp, Artificial Sequence
  Synthetic
  modified_base (3)..(3): methylated C nucleotide
  modified_base (19)..(19): methylated C nucleotide
  modified_base (21)..(21): methylated C nucleotide
gccgcattgaattaactacgcg

SEQ ID NO: 353 - DNA, 20 bp, Artificial Sequence
  Synthetic
  modified_base (3)..(3): methylated C nucleotide
  modified_base (19)..(19): methylated C nucleotide
gccgcattgaattaactacg

SEQ ID NO: 354 - DNA, 18 bp, Artificial Sequence
  Synthetic
  modified_base (3)..(3): methylated C nucleotide
gccgcattgaattaacta

SEQ ID NO: 355 - DNA, 16 bp, Artificial Sequence
  Synthetic
  modified_base (3)..(3): methylated C nucleotide
gccgcattgaattaac

SEQ ID NO: 356 - DNA, 15 bp, Artificial Sequence
  Synthetic
  modified_base (3)..(3): methylated C nucleotide
gccgcattgaattaa

SEQ ID NO: 357 - DNA, 26 bp, Artificial Sequence
  Synthetic
  modified_base (3)..(3): methylated C nucleotide
  modified_base (19)..(19): methylated C nucleotide
  modified_base (21)..(21): methylated C nucleotide
  modified_base (23)..(23): methylated C nucleotide
gccgcattgaattcactacgcgcgcc

SEQ ID NO: 358 - DNA, 26 bp, Artificial Sequence
  Synthetic
  modified_base (3)..(3): methylated C nucleotide
  modified_base (19)..(19): methylated C nucleotide
  modified_base (21)..(21): methylated C nucleotide
  modified_base (23)..(23): methylated C nucleotide
gccgcatcgaattaactacgcgcgcc

SEQ ID NO: 359 - DNA, 26 bp, Artificial Sequence
  Synthetic
  modified_base (3)..(3): methylated C nucleotide
  modified_base (19)..(19): methylated C nucleotide
  modified_base (21)..(21): methylated C nucleotide
  modified_base (23)..(23): methylated C nucleotide
gccgcattgagttaactacgcgcgcc

SEQ ID NO: 360 - DNA, 24 bp, Artificial Sequence
  Synthetic
  modified_base (3)..(3): methylated C nucleotide
  modified_base (10)..(10): methylated C nucleotide
  modified_base (21)..(21): methylated C nucleotide
gccggtgggcggagagttagcgag

SEQ ID NO: 361 - DNA, 25 bp, Artificial Sequence
  Synthetic
  modified_base (4)..(4): methylated C nucleotide
  modified_base (11)..(11): methylated C nucleotide
  modified_base (22)..(22): methylated C nucleotide
ggccggtgggcggagagttagcgag

SEQ ID NO: 362 - DNA, 26 bp, Artificial Sequence
  Synthetic
  modified_base (5)..(5): methylated C nucleotide
  modified_base (12)..(12): methylated C nucleotide
  modified_base (23)..(23): methylated C nucleotide
gggccggtgggcggagagttagcgag

SEQ ID NO: 363 - DNA, 27 bp, Artificial Sequence
  Synthetic
  modified_base (6)..(6): methylated C nucleotide
  modified_base (13)..(13): methylated C nucleotide
  modified_base (24)..(24): methylated C nucleotide
agggccggtgggcggagagttagcgag

SEQ ID NO: 364 - DNA, 28 bp, Artificial Sequence
  Synthetic
  modified_base (7)..(7): methylated C nucleotide
  modified_base (14)..(14): methylated C nucleotide
  modified_base (25)..(25): methylated C nucleotide
aagggccggtgggcggagagttagcgag

SEQ ID NO: 365 - DNA, 29 bp, Artificial Sequence
  Synthetic
  modified_base (8)..(8): methylated C nucleotide
  modified_base (15)..(15): methylated C nucleotide
  modified_base (26)..(26): methylated C nucleotide
aaagggccggtgggcggagagttagcgag

SEQ ID NO: 366 - DNA, 25 bp, Artificial Sequence
  Synthetic
  modified_base (3)..(3): methylated C nucleotide
  modified_base (10)..(10): methylated C nucleotide
  modified_base (21)..(21): methylated C nucleotide
gccggtgggcggagagttagcgaga

SEQ ID NO: 367 - DNA, 26 bp, Artificial Sequence
  Synthetic
  modified_base (3)..(3): methylated C nucleotide
  modified_base (10)..(10): methylated C nucleotide
  modified_base (21)..(21): methylated C nucleotide
gccggtgggcggagagttagcgagag

SEQ ID NO: 368 - DNA, 27 bp, Artificial Sequence
  Synthetic
  modified_base (3)..(3): methylated C nucleotide
  modified_base (10)..(10): methylated C nucleotide
  modified_base (21)..(21): methylated C nucleotide
gccggtgggcggagagttagcgagaga

SEQ ID NO: 369 - DNA, 28 bp, Artificial Sequence
  Synthetic
  modified_base (3)..(3): methylated C nucleotide
  modified_base (10)..(10): methylated C nucleotide
  modified_base (21)..(21): methylated C nucleotide
gccggtgggcggagagttagcgagagag

SEQ ID NO: 370 - DNA, 29 bp, Artificial Sequence
  Synthetic
  modified_base (3)..(3): methylated C nucleotide
  modified_base (10)..(10): methylated C nucleotide
  modified_base (21)..(21): methylated C nucleotide
gccggtgggcggagagttagcgagagagg

SEQ ID NO: 371 - DNA, 26 bp, Artificial Sequence
  Synthetic
  modified_base (4)..(4): methylated C nucleotide
  modified_base (11)..(11): methylated C nucleotide
  modified_base (22)..(22): methylated C nucleotide
ggccggtgggcggagagttagcgaga

SEQ ID NO: 372 - DNA, 28 bp, Artificial Sequence
  Synthetic
  modified_base (5)..(5): methylated C nucleotide
  modified_base (12)..(12): methylated C nucleotide
  modified_base (23)..(23): methylated C nucleotide
gggccggtgggcggagagttagcgagag

SEQ ID NO: 373 - DNA, 30 bp, Artificial Sequence
  Synthetic
  modified_base (6)..(6): methylated C nucleotide
  modified_base (13)..(13): methylated C nucleotide
  modified_base (24)..(24): methylated C nucleotide
agggccggtgggcggagagttagcgagaga

SEQ ID NO: 374 - DNA, 32 bp, Artificial Sequence
  Synthetic
  modified_base (7)..(7): methylated C nucleotide
  modified_base (14)..(14): methylated C nucleotide
  modified_base (25)..(25): methylated C nucleotide
aagggccggtgggcggagagttagcgagagag

SEQ ID NO: 375 - DNA, 34 bp, Artificial Sequence
  Synthetic
  modified_base (8)..(8): methylated C nucleotide
  modified_base (15)..(15): methylated C nucleotide
  modified_base (26)..(26): methylated C nucleotide
aaagggccggtgggcggagagttagcgagagagg

SEQ ID NO: 376 - DNA, 24 bp, Artificial Sequence
  Synthetic
  modified_base (6)..(6): methylated C nucleotide
  modified_base (13)..(13): methylated C nucleotide
  modified_base (24)..(24): methylated C nucleotide
agggccggtgggcggagagttagc

SEQ ID NO: 377 - DNA, 24 bp, Artificial Sequence
  Synthetic
  modified_base (9)..(9): methylated C nucleotide
  modified_base (16)..(16): methylated C nucleotide
taaagggccggtgggcggagagtt

SEQ ID NO: 378 - DNA, 25 bp, Artificial Sequence
  Synthetic
  modified_base (12)..(12): methylated C nucleotide
  modified_base (19)..(19): methylated C nucleotide
ttataaagggccggtgggcggagag

SEQ ID NO: 379 - DNA, 25 bp, Artificial Sequence
  Synthetic
  modified_base (15)..(15): methylated C nucleotide
  modified_base (22)..(22): methylated C nucleotide
gcattataaagggccggtgggcgga

SEQ ID NO: 380 - DNA, 25 bp, Artificial Sequence
  Synthetic
  modified_base (18)..(18): methylated C nucleotide
  modified_base (25)..(25): methylated C nucleotide
ctcgcattataaagggccggtgggc

SEQ ID NO: 381 - DNA, 25 bp, Artificial Sequence
  Synthetic
  modified_base (7)..(7): methylated C nucleotide
  modified_base (19)..(19): methylated C nucleotide
ggtgggcggagagattagcgagaga

SEQ ID NO: 382 - DNA, 24 bp, Artificial Sequence
  Synthetic
  modified_base (4)..(4): methylated C nucleotide
  modified_base (15)..(15): methylated C nucleotide
gggcggagagttagcgagagagga

SEQ ID NO: 383 - DNA, 24 bp, Artificial Sequence
  Synthetic
  modified_base (1)..(1): methylated C nucleotide
  modified_base (12)..(12): methylated C nucleotide
cggagagttagcgagagaggatct

SEQ ID NO: 384 - DNA, 24 bp, Artificial Sequence
  Synthetic
  modified_base (9)..(9): methylated C nucleotide
agagttagcgagagaggatctttt

SEQ ID NO: 385 - DNA, 24 bp, Artificial Sequence
  Synthetic
  modified_base (6)..(6): methylated C nucleotide
gttagcgagagaggatcttttttc

SEQ ID NO: 386 - DNA, 22 bp, Artificial Sequence
  Synthetic
  modified_base (1)..(1): methylated C nucleotide
  modified_base (8)..(8): methylated C nucleotide
  modified_base (19)..(19): methylated C nucleotide
cggtgggcggagagttagcgag

SEQ ID NO: 387 - DNA, 20 bp, Artificial Sequence
  Synthetic
  modified_base (6)..(6): methylated C nucleotide
  modified_base (17)..(17): methylated C nucleotide
gtgggcggagagttagcgag

SEQ ID NO: 388 - DNA, 18 bp, Artificial Sequence
  Synthetic
  modified_base (4)..(4): methylated C nucleotide
  modified_base (15)..(15): methylated C nucleotide
gggcggagagttagcgag

SEQ ID NO: 389 - DNA, 16 bp, Artificial Sequence
  Synthetic
  modified_base (2)..(2): methylated C nucleotide
  modified_base (13)..(13): methylated C nucleotide
gcggagagttagcgag

SEQ ID NO: 390 - DNA, 14 bp, Artificial Sequence
  Synthetic
  modified_base (11)..(11): methylated C nucleotide
ggagagttagcgag

SEQ ID NO: 391 - DNA, 22 bp, Artificial Sequence
  Synthetic
  modified_base (3)..(3): methylated C nucleotide
  modified_base (10)..(10): methylated C nucleotide
  modified_base (21)..(21): methylated C nucleotide
gccggtgggcggagagttagcg

SEQ ID NO: 392 - DNA, 20 bp, Artificial Sequence
  Synthetic
  modified_base (3)..(3): methylated C nucleotide
  modified_base (10)..(10): methylated C nucleotide
gccggtgggcggagagttag

SEQ ID NO: 393 - DNA, 18 bp, Artificial Sequence
  Synthetic
  modified_base (3)..(3): methylated C nucleotide
  modified_base (10)..(10): methylated C nucleotide
gccggtgggcggagagtt

SEQ ID NO: 394 - DNA, 16 bp, Artificial Sequence
  Synthetic
  modified_base (3)..(3): methylated C nucleotide
  modified_base (10)..(10): methylated C nucleotide
gccggtgggcggagag

SEQ ID NO: 395 - DNA, 15 bp, Artificial Sequence
  Synthetic
  modified_base (3)..(3): methylated C nucleotide
  modified_base (10)..(10): methylated C nucleotide
gccggtgggcggaga

SEQ ID NO: 396 - DNA, 24 bp, Artificial Sequence
  Synthetic
  modified_base (3)..(3): methylated C nucleotide
  modified_base (10)..(10): methylated C nucleotide
  modified_base (21)..(21): methylated C nucleotide
gccggtgggcggtgagttagcgag

SEQ ID NO: 397 - DNA, 24 bp, Artificial Sequence
  Synthetic
  modified_base (3)..(3): methylated C nucleotide
  modified_base (10)..(10): methylated C nucleotide
  modified_base (21)..(21): methylated C nucleotide
gccggtcggcggagagttagcgag

SEQ ID NO: 398 - DNA, 24 bp, Artificial Sequence
  Synthetic
  modified_base (3)..(3): methylated C nucleotide
  modified_base (10)..(10): methylated C nucleotide
  modified_base (21)..(21): methylated C nucleotide
gccggtgggcggagagttagctag

SEQ ID NO: 399 - DNA, 28 bp, Artificial Sequence
  Synthetic
  modified_base (3)..(3): methylated C nucleotide
  modified_base (5)..(5): methylated C nucleotide
  modified_base (12)..(12): methylated C nucleotide
  modified_base (17)..(17): methylated C nucleotide
  modified_base (22)..(22): methylated C nucleotide
  modified_base (24)..(24): methylated C nucleotide
  modified_base (26)..(26): methylated C nucleotide
tgcgcgcccaccgccacgccacgcgcgt

SEQ ID NO: 400 - DNA, 29 bp, Artificial Sequence
  Synthetic
  modified_base (4)..(4): methylated C nucleotide
  modified_base (6)..(6): methylated C nucleotide
  modified_base (13)..(13): methylated C nucleotide
  modified_base (18)..(18): methylated C nucleotide
  modified_base (23)..(23): methylated C nucleotide
  modified_base (25)..(25): methylated C nucleotide
  modified_base (27)..(27): methylated C nucleotide
ctgcgcgcccaccgccacgccacgcgcgt

SEQ ID NO: 401 - DNA, 30 bp, Artificial Sequence
  Synthetic
  modified_base (5)..(5): methylated C nucleotide
  modified_base (7)..(7): methylated C nucleotide
  modified_base (14)..(14): methylated C nucleotide
  modified_base (19)..(19): methylated C nucleotide
  modified_base (24)..(24): methylated C nucleotide
  modified_base (26)..(26): methylated C nucleotide
  modified_base (28)..(28): methylated C nucleotide
actgcgcgcccaccgccacgccacgcgcgt

SEQ ID NO: 402 - DNA, 31 bp, Artificial Sequence
  Synthetic
  modified_base (6)..(6): methylated C nucleotide
  modified_base (8)..(8): methylated C nucleotide
  modified_base (15)..(15): methylated C nucleotide
  modified_base (20)..(20): methylated C nucleotide
  modified_base (25)..(25): methylated C nucleotide
  modified_base (27)..(27): methylated C nucleotide
  modified_base (29)..(29): methylated C nucleotide
cactgcgcgcccaccgccacgccacgcgcgt

SEQ ID NO: 403 - DNA, 32 bp, Artificial Sequence
  Synthetic
  modified_base (7)..(7): methylated C nucleotide
  modified_base (9)..(9): methylated C nucleotide
  modified_base (16)..(16): methylated C nucleotide
  modified_base (21)..(21): methylated C nucleotide
  modified_base (26)..(26): methylated C nucleotide
  modified_base (28)..(28): methylated C nucleotide
  modified_base (30)..(30): methylated C nucleotide
ccactgcgcgcccaccgccacgccacgcgcgt

SEQ ID NO: 404 - DNA, 33 bp, Artificial Sequence
  Synthetic
  modified_base (8)..(8): methylated C nucleotide
  modified_base (10)..(10): methylated C nucleotide
  modified_base (17)..(17): methylated C nucleotide
  modified_base (22)..(22): methylated C nucleotide
  modified_base (27)..(27): methylated C nucleotide
  modified_base (29)..(29): methylated C nucleotide
  modified_base (31)..(31): methylated C nucleotide
accactgcgcgcccaccgccacgccacgcgcgt

SEQ ID NO: 405 - DNA, 29 bp, Artificial Sequence
  Synthetic
  modified_base (3)..(3): methylated C nucleotide
  modified_base (5)..(5): methylated C nucleotide
  modified_base (12)..(12): methylated C nucleotide
  modified_base (17)..(17): methylated C nucleotide
  modified_base (22)..(22): methylated C nucleotide
  modified_base (24)..(24): methylated C nucleotide
  modified_base (26)..(26): methylated C nucleotide
tgcgcgcccaccgccacgccacgcgcgta

SEQ ID NO: 406 - DNA, 30 bp, Artificial Sequence
  Synthetic
  modified_base (3)..(3): methylated C nucleotide
  modified_base (5)..(5): methylated C nucleotide
  modified_base (12)..(12): methylated C nucleotide
  modified_base (17)..(17): methylated C nucleotide
  modified_base (22)..(22): methylated C nucleotide
  modified_base (24)..(24): methylated C nucleotide
  modified_base (26)..(26): methylated C nucleotide
tgcgcgcccaccgccacgccacgcgcgtac

SEQ ID NO: 407 - DNA, 31 bp, Artificial Sequence
  Synthetic
  modified_base (3)..(3): methylated C nucleotide
  modified_base (5)..(5): methylated C nucleotide
  modified_base (12)..(12): methylated C nucleotide
  modified_base (17)..(17): methylated C nucleotide
  modified_base (22)..(22): methylated C nucleotide
  modified_base (24)..(24): methylated C nucleotide
  modified_base (26)..(26): methylated C nucleotide
tgcgcgcccaccgccacgccacgcgcgtacc

SEQ ID NO: 408 - DNA, 32 bp, Artificial Sequence
  Synthetic
  modified_base (3)..(3): methylated C nucleotide
  modified_base (5)..(5): methylated C nucleotide
  modified_base (12)..(12): methylated C nucleotide
  modified_base (17)..(17): methylated C nucleotide
  modified_base (22)..(22): methylated C nucleotide
  modified_base (24)..(24): methylated C nucleotide
  modified_base (26)..(26): methylated C nucleotide
tgcgcgcccaccgccacgccacgcgcgtacca

SEQ ID NO: 409 - DNA, 33 bp, Artificial Sequence
  Synthetic
  modified_base (3)..(3): methylated C nucleotide
  modified_base (5)..(5): methylated C nucleotide
  modified_base (12)..(12): methylated C nucleotide
  modified_base (17)..(17): methylated C nucleotide
  modified_base (22)..(22): methylated C nucleotide
  modified_base (24)..(24): methylated C nucleotide
  modified_base (26)..(26): methylated C nucleotide
tgcgcgcccaccgccacgccacgcgcgtaccag

SEQ ID NO: 410 - DNA, 30 bp, Artificial Sequence
  Synthetic
  modified_base (4)..(4): methylated C nucleotide
  modified_base (6)..(6): methylated C nucleotide
  modified_base (13)..(13): methylated C nucleotide
  modified_base (18)..(18): methylated C nucleotide
  modified_base (23)..(23): methylated C nucleotide
  modified_base (25)..(25): methylated C nucleotide
  modified_base (27)..(27): methylated C nucleotide
ctgcgcgcccaccgccacgccacgcgcgta

SEQ ID NO: 411 - DNA, 32 bp, Artificial Sequence
  Synthetic
  modified_base (5)..(5): methylated C nucleotide
  modified_base (7)..(7): methylated C nucleotide
  modified_base (14)..(14): methylated C nucleotide
  modified_base (19)..(19): methylated C nucleotide
  modified_base (24)..(24): methylated C nucleotide
  modified_base (26)..(26): methylated C nucleotide
  modified_base (28)..(28): methylated C nucleotide
actgcgcgcccaccgccacgccacgcgcgtac

SEQ ID NO: 412 - DNA, 34 bp, Artificial Sequence
  Synthetic
  modified_base (6)..(6): methylated C nucleotide
  modified_base (8)..(8): methylated C nucleotide
  modified_base (15)..(15): methylated C nucleotide
  modified_base (20)..(20): methylated C nucleotide
  modified_base (25)..(25): methylated C nucleotide
  modified_base (27)..(27): methylated C nucleotide
  modified_base (29)..(29): methylated C nucleotide
cactgcgcgcccaccgccacgccacgcgcgtacc

SEQ ID NO: 413 - DNA, 36 bp, Artificial Sequence
  Synthetic
  modified_base (7)..(7): methylated C nucleotide
  modified_base (9)..(9): methylated C nucleotide
  modified_base (16)..(16): methylated C nucleotide
  modified_base (21)..(21): methylated C nucleotide
  modified_base (26)..(26): methylated C nucleotide
  modified_base (28)..(28): methylated C nucleotide
  modified_base (30)..(30): methylated C nucleotide
ccactgcgcgcccaccgccacgccacgcgcgtacca

SEQ ID NO: 414 - DNA, 38 bp, Artificial Sequence
  Synthetic
  modified_base (8)..(8): methylated C nucleotide
  modified_base (10)..(10): methylated C nucleotide
  modified_base (17)..(17): methylated C nucleotide
  modified_base (22)..(22): methylated C nucleotide
  modified_base (27)..(27): methylated C nucleotide
  modified_base (29)..(29): methylated C nucleotide
  modified_base (31)..(31): methylated C nucleotide
accactgcgcgcccaccgccacgccacgcgcgtaccag

SEQ ID NO: 415 - DNA, 28 bp, Artificial Sequence
  Synthetic
  modified_base (6)..(6): methylated C nucleotide
  modified_base (8)..(8): methylated C nucleotide
  modified_base (15)..(15): methylated C nucleotide
  modified_base (20)..(20): methylated C nucleotide
  modified_base (25)..(25): methylated C nucleotide
  modified_base (27)..(27): methylated C nucleotide
cactgcgcgcccaccgccacgccacgcg

SEQ ID NO: 416 - DNA, 28 bp, Artificial Sequence
  Synthetic
  modified_base (9)..(9): methylated C nucleotide
  modified_base (11)..(11): methylated C nucleotide
  modified_base (18)..(18): methylated C nucleotide
  modified_base (23)..(23): methylated C nucleotide
  modified_base (28)..(28): methylated C nucleotide
aaccactgcgcgcccaccgccacgccac

SEQ ID NO: 417 - DNA, 28 bp, Artificial Sequence
  Synthetic
  modified_base (12)..(12): methylated C nucleotide
  modified_base (14)..(14): methylated C nucleotide
  modified_base (21)..(21): methylated C nucleotide
  modified_base (26)..(26): methylated C nucleotide
gagaaccactgcgcgcccaccgccacgc

SEQ ID NO: 418 - DNA, 28 bp, Artificial Sequence
  Synthetic
  modified_base (15)..(15): methylated C nucleotide
  modified_base (17)..(17): methylated C nucleotide
  modified_base (24)..(24): methylated C nucleotide
accgagaaccactgcgcgcccaccgcca

SEQ ID NO: 419 - DNA, 28 bp, Artificial Sequence
  Synthetic
  modified_base (18)..(18): methylated C nucleotide
  modified_base (20)..(20): methylated C nucleotide
  modified_base (27)..(27): methylated C nucleotide
cacaccgagaaccactgcgcgcccaccg

SEQ ID NO: 420 - DNA, 28 bp, Artificial Sequence
  Synthetic
  modified_base (2)..(2): methylated C nucleotide
  modified_base (9)..(9): methylated C nucleotide
  modified_base (14)..(14): methylated C nucleotide
  modified_base (19)..(19): methylated C nucleotide
  modified_base (21)..(21): methylated C nucleotide
  modified_base (23)..(23): methylated C nucleotide
gcgcccaccgccacgccacgcgcgtacc

SEQ ID NO: 421 - DNA, 28 bp, Artificial Sequence
  Synthetic
  modified_base (6)..(6): methylated C nucleotide
  modified_base (11)..(11): methylated C nucleotide
  modified_base (16)..(16): methylated C nucleotide
  modified_base (18)..(18): methylated C nucleotide
  modified_base (20)..(20): methylated C nucleotide
cccaccgccacgccacgcgcgtaccagg

SEQ ID NO: 422 - DNA, 28 bp, Artificial Sequence
  Synthetic
  modified_base (3)..(3): methylated C nucleotide
  modified_base (8)..(8): methylated C nucleotide
  modified_base (13)..(13): methylated C nucleotide
  modified_base (15)..(15): methylated C nucleotide
  modified_base (17)..(17): methylated C nucleotide
accgccacgccacgcgcgtaccaggctg

SEQ ID NO: 423 - DNA, 28 bp, Artificial Sequence
  Synthetic
  modified_base (5)..(5): methylated C nucleotide
  modified_base (10)..(10): methylated C nucleotide
  modified_base (12)..(12): methylated C nucleotide
  modified_base (14)..(14): methylated C nucleotide
gccacgccacgcgcgtaccaggctgcag

SEQ ID NO: 424 - DNA, 26 bp, Artificial Sequence
  Synthetic
  modified_base (1)..(1): methylated C nucleotide
  modified_base (3)..(3): methylated C nucleotide
  modified_base (10)..(10): methylated C nucleotide
  modified_base (15)..(15): methylated C nucleotide
  modified_base (20)..(20): methylated C nucleotide
  modified_base (22)..(22): methylated C nucleotide
  modified_base (24)..(24): methylated C nucleotide
cgcgcccaccgccacgccacgcgcgt

SEQ ID NO: 425 - DNA, 24 bp, Artificial Sequence
  Synthetic
  modified_base (1)..(1): methylated C nucleotide
  modified_base (8)..(8): methylated C nucleotide
  modified_base (13)..(13): methylated C nucleotide
  modified_base (18)..(18): methylated C nucleotide
  modified_base (20)..(20): methylated C nucleotide
  modified_base (22)..(22): methylated C nucleotide
cgcccaccgccacgccacgcgcgt

SEQ ID NO: 426 - DNA, 22 bp, Artificial Sequence
  Synthetic
  modified_base (6)..(6): methylated C nucleotide
  modified_base (11)..(11): methylated C nucleotide
  modified_base (16)..(16): methylated C nucleotide
  modified_base (18)..(18): methylated C nucleotide
  modified_base (20)..(20): methylated C nucleotide
cccaccgccacgccacgcgcgt

SEQ ID NO: 427 - DNA, 20 bp, Artificial Sequence
  Synthetic
  modified_base (4)..(4): methylated C nucleotide
  modified_base (9)..(9): methylated C nucleotide
  modified_base (14)..(14): methylated C nucleotide
  modified_base (16)..(16): methylated C nucleotide
  modified_base (18)..(18): methylated C nucleotide
caccgccacgccacgcgcgt

SEQ ID NO: 428 - DNA, 18 bp, Artificial Sequence
  Synthetic
  modified_base (2)..(2): methylated C nucleotide
  modified_base (7)..(7): methylated C nucleotide
  modified_base (12)..(12): methylated C nucleotide
  modified_base (14)..(14): methylated C nucleotide
  modified_base (16)..(16): methylated C nucleotide
ccgccacgccacgcgcgt

SEQ ID NO: 429 - DNA, 16 bp, Artificial Sequence
  Synthetic
  modified_base (5)..(5): methylated C nucleotide
  modified_base (10)..(10): methylated C nucleotide
  modified_base (12)..(12): methylated C nucleotide
  modified_base (14)..(14): methylated C nucleotide
gccacgccacgcgcgt

SEQ ID NO: 430 - DNA, 15 bp, Artificial Sequence
  Synthetic
  modified_base (4)..(4): methylated C nucleotide
  modified_base (9)..(9): methylated C nucleotide
  modified_base (11)..(11): methylated C nucleotide
  modified_base (13)..(13): methylated C nucleotide
ccacgccacgcgcgt

SEQ ID NO: 431 - DNA, 26 bp, Artificial Sequence
  Synthetic
  modified_base (3)..(3): methylated C nucleotide
  modified_base (5)..(5): methylated C nucleotide
  modified_base (12)..(12): methylated C nucleotide
  modified_base (17)..(17): methylated C nucleotide
  modified_base (22)..(22): methylated C nucleotide
  modified_base (24)..(24): methylated C nucleotide
  modified_base (26)..(26): methylated C nucleotide
tgcgcgcccaccgccacgccacgcgc

SEQ ID NO: 432 - DNA, 24 bp, Artificial Sequence
  Synthetic
  modified_base (3)..(3): methylated C nucleotide
  modified_base (5)..(5): methylated C nucleotide
  modified_base (12)..(12): methylated C nucleotide
  modified_base (17)..(17): methylated C nucleotide
  modified_base (22)..(22): methylated C nucleotide
  modified_base (24)..(24): methylated C nucleotide
tgcgcgcccaccgccacgccacgc

SEQ ID NO: 433 - DNA, 22 bp, Artificial Sequence
  Synthetic
  modified_base (3)..(3): methylated C nucleotide
  modified_base (5)..(5): methylated C nucleotide
  modified_base (12)..(12): methylated C nucleotide
  modified_base (17)..(17): methylated C nucleotide
  modified_base (22)..(22): methylated C nucleotide
tgcgcgcccaccgccacgccac

SEQ ID NO: 434 - DNA, 20 bp, Artificial Sequence
  Synthetic
  modified_base (3)..(3): methylated C nucleotide
  modified_base (5)..(5): methylated C nucleotide
  modified_base (12)..(12): methylated C nucleotide
  modified_base (17)..(17): methylated C nucleotide
tgcgcgcccaccgccacgcc

SEQ ID NO: 435 - DNA, 18 bp, Artificial Sequence
  Synthetic
  modified_base (3)..(3): methylated C nucleotide
  modified_base (5)..(5): methylated C nucleotide
  modified_base (12)..(12): methylated C nucleotide
  modified_base (17)..(17): methylated C nucleotide
tgcgcgcccaccgccacg

SEQ ID NO: 436 - DNA, 16 bp, Artificial Sequence
  Synthetic
  modified_base (3)..(3): methylated C nucleotide
  modified_base (5)..(5): methylated C nucleotide
  modified_base (12)..(12): methylated C nucleotide
tgcgcgcccaccgcca

SEQ ID NO: 437 - DNA, 15 bp, Artificial Sequence
  Synthetic
  modified_base (3)..(3): methylated C nucleotide
  modified_base (5)..(5): methylated C nucleotide
  modified_base (12)..(12): methylated C nucleotide
tgcgcgcccaccgcc

SEQ ID NO: 438 - DNA, 28 bp, Artificial Sequence
  Synthetic
  modified_base (3)..(3): methylated C nucleotide
  modified_base (5)..(5): methylated C nucleotide
  modified_base (12)..(12): methylated C nucleotide
  modified_base (17)..(17): methylated C nucleotide
  modified_base (22)..(22): methylated C nucleotide
  modified_base (24)..(24): methylated C nucleotide
  modified_base (26)..(26): methylated C nucleotide
tgcgcgcccaccgccgcgccacgcgcgt

SEQ ID NO: 439 - DNA, 28 bp, Artificial Sequence
  Synthetic
  modified_base (3)..(3): methylated C nucleotide
  modified_base (5)..(5): methylated C nucleotide
  modified_base (12)..(12): methylated C nucleotide
  modified_base (17)..(17): methylated C nucleotide
  modified_base (22)..(22): methylated C nucleotide
  modified_base (24)..(24): methylated C nucleotide
  modified_base (26)..(26): methylated C nucleotide
tgcgcgtccaccgccacgccacgcgcgt

SEQ ID NO: 440 - DNA, 28 bp, Artificial Sequence
  Synthetic
  modified_base (3)..(3): methylated C nucleotide
  modified_base (5)..(5): methylated C nucleotide
  modified_base (12)..(12): methylated C nucleotide
  modified_base (17)..(17): methylated C nucleotide
  modified_base (22)..(22): methylated C nucleotide
  modified_base (24)..(24): methylated C nucleotide
  modified_base (26)..(26): methylated C nucleotide
tgcgcgcccgccgccacgccacgcgcgt

SEQ ID NO: 441 - DNA, 25 bp, Artificial Sequence
  Synthetic
  modified_base (7)..(7): methylated C nucleotide
  modified_base (19)..(19): methylated C nucleotide
  modified_base (22)..(22): methylated C nucleotide
tgggtgcgtccctcctagcgccggg

SEQ ID NO: 442 - DNA, 26 bp, Artificial Sequence
  Synthetic
  modified_base (8)..(8): methylated C nucleotide
  modified_base (20)..(20): methylated C nucleotide
  modified_base (23)..(23): methylated C nucleotide
ctgggtgcgtccctcctagcgccggg

SEQ ID NO: 443 - DNA, 27 bp, Artificial Sequence
  Synthetic
  modified_base (9)..(9): methylated C nucleotide
  modified_base (21)..(21): methylated C nucleotide
  modified_base (24)..(24): methylated C nucleotide
cctgggtgcgtccctcctagcgccggg

SEQ ID NO: 444 - DNA, 28 bp, Artificial Sequence
  Synthetic
  modified_base (10)..(10): methylated C nucleotide
  modified_base (22)..(22): methylated C nucleotide
  modified_base (25)..(25): methylated C nucleotide
gcctgggtgcgtccctcctagcgccggg

SEQ ID NO: 445 - DNA, 29 bp, Artificial Sequence
  Synthetic
  modified_base (11)..(11): methylated C nucleotide
  modified_base (23)..(23): methylated C nucleotide
  modified_base (26)..(26): methylated C nucleotide
ggcctgggtgcgtccctcctagcgccggg

SEQ ID NO: 446 - DNA, 30 bp, Artificial Sequence
  Synthetic
  modified_base (12)..(12): methylated C nucleotide
  modified_base (24)..(24): methylated C nucleotide
  modified_base (27)..(27): methylated C nucleotide
aggcctgggtgcgtccctcctagcgccggg

SEQ ID NO: 447 - DNA, 26 bp, Artificial Sequence
  Synthetic
  modified_base (7)..(7): methylated C nucleotide
  modified_base (19)..(19): methylated C nucleotide
  modified_base (22)..(22): methylated C nucleotide
tgggtgcgtccctcctagcgccggga

SEQ ID NO: 448 - DNA, 27 bp, Artificial Sequence
  Synthetic
  modified_base (7)..(7): methylated C nucleotide
  modified_base (19)..(19): methylated C nucleotide
  modified_base (22)..(22): methylated C nucleotide
tgggtgcgtccctcctagcgccgggaa

SEQ ID NO: 449 - DNA, 28 bp, Artificial Sequence
  Synthetic
  modified_base (7)..(7): methylated C nucleotide
  modified_base (19)..(19): methylated C nucleotide
  modified_base (22)..(22): methylated C nucleotide
tgggtgcgtccctcctagcgccgggaag

SEQ ID NO: 450 - DNA, 29 bp, Artificial Sequence
  Synthetic
  modified_base (7)..(7): methylated C nucleotide
  modified_base (19)..(19): methylated C nucleotide
  modified_base (22)..(22): methylated C nucleotide
tgggtgcgtccctcctagcgccgggaagc

SEQ ID NO: 451 - DNA, 30 bp, Artificial Sequence
  Synthetic
  modified_base (7)..(7): methylated C nucleotide
  modified_base (19)..(19): methylated C nucleotide
  modified_base (22)..(22): methylated C nucleotide
tgggtgcgtccctcctagcgccgggaagct

SEQ ID NO: 452 - DNA, 27 bp, Artificial Sequence
  Synthetic
  modified_base (8)..(8): methylated C nucleotide
  modified_base (20)..(20): methylated C nucleotide
  modified_base (23)..(23): methylated C nucleotide
ctgggtgcgtccctcctagcgccggga

SEQ ID NO: 453 - DNA, 29 bp, Artificial Sequence
  Synthetic
  modified_base (9)..(9): methylated C nucleotide
  modified_base (21)..(21): methylated C nucleotide
  modified_base (24)..(24): methylated C nucleotide
cctgggtgcgtccctcctagcgccgggaa

SEQ ID NO: 454 - DNA, 31 bp, Artificial Sequence
  Synthetic
  modified_base (10)..(10): methylated C nucleotide
  modified_base (22)..(22): methylated C nucleotide
  modified_base (25)..(25): methylated C nucleotide
gcctgggtgcgtccctcctagcgccgggaag

SEQ ID NO: 455 - DNA, 33 bp, Artificial Sequence
  Synthetic
  modified_base (11)..(11): methylated C nucleotide
  modified_base (23)..(23): methylated C nucleotide
  modified_base (26)..(26): methylated C nucleotide
ggcctgggtgcgtccctcctagcgccgggaagc

SEQ ID NO: 456 - DNA, 35 bp, Artificial Sequence
  Synthetic
  modified_base (12)..(12): methylated C nucleotide
  modified_base (24)..(24): methylated C nucleotide
  modified_base (27)..(27): methylated C nucleotide
aggcctgggtgcgtccctcctagcgccgggaagct

SEQ ID NO: 457 - DNA, 25 bp, Artificial Sequence
  Synthetic
  modified_base (10)..(10)
  modified_base (22)..(22)
  modified_base (25)..(25)
gcctgggtgcgtccctcctagcgcc

SEQ ID NO: 458 - DNA, 25 bp, Artificial Sequence
  Synthetic
  modified_base (13)..(13): methylated C nucleotide
  modified_base (25)..(25): methylated C nucleotide
caggcctgggtgcgtccctcctagc

SEQ ID NO: 459 - DNA, 25 bp, Artificial Sequence
  Synthetic
  modified_base (16)..(16): methylated C nucleotide
gcgcaggcctgggtgcgtccctcct

SEQ ID NO: 460 - DNA, 25 bp, Artificial Sequence
  Synthetic
  modified_base (19)..(19): methylated C nucleotide
ttcgcgcaggcctgggtgcgtccct

SEQ ID NO: 461 - DNA, 25 bp, Artificial Sequence
  Synthetic
  modified_base (22)..(22): methylated C nucleotide
ctcttcgcgcaggcctgggtgcgtc

SEQ ID NO: 462 - DNA, 25 bp, Artificial Sequence
  Synthetic
  modified_base (4)..(4): methylated C nucleotide
  modified_base (16)..(16): methylated C nucleotide
  modified_base (19)..(19): methylated C nucleotide
gtgcgtccctcctagcgccgggaag

SEQ ID NO: 463 - DNA, 25 bp, Artificial Sequence
  Synthetic
  modified_base (1)..(1): methylated C nucleotide
  modified_base (13)..(13): methylated C nucleotide
  modified_base (16)..(16): methylated C nucleotide
cgtccctcctagcgccgggaagctg

SEQ ID NO: 464 - DNA, 25 bp, Artificial Sequence
  Synthetic
  modified_base (10)..(10): methylated C nucleotide
  modified_base (13)..(13): methylated C nucleotide
ccctcctagcgccgggaagctgggt

SEQ ID NO: 465 - DNA, 25 bp, Artificial Sequence
  Synthetic
  modified_base (7)..(7): methylated C nucleotide
  modified_base (10)..(10): methylated C nucleotide
tcctagcgccgggaagctgggttgc

SEQ ID NO: 466 - DNA, 25 bp, Artificial Sequence
  Synthetic
  modified_base (4)..(4): methylated C nucleotide
  modified_base (7)..(7): methylated C nucleotide
tagcgccgggaagctgggttgcctg

SEQ ID NO: 467 - DNA, 23 bp, Artificial Sequence
  Synthetic
  modified_base (5)..(5): methylated C nucleotide
  modified_base (17)..(17): methylated C nucleotide
  modified_base (20)..(20): methylated C nucleotide
ggtgcgtccctcctagcgccggg

SEQ ID NO: 468 - DNA, 21 bp, Artificial Sequence
  Synthetic
  modified_base (3)..(3): methylated C nucleotide
  modified_base (15)..(15): methylated C nucleotide
  modified_base (18)..(18): methylated C nucleotide
tgcgtccctcctagcgccggg

SEQ ID NO: 469 - DNA, 19 bp, Artificial Sequence
  Synthetic
  modified_base (1)..(1): methylated C nucleotide
  modified_base (13)..(13): methylated C nucleotide
  modified_base (16)..(16): methylated C nucleotide
cgtccctcctagcgccggg

SEQ ID NO: 470 - DNA, 17 bp, Artificial Sequence
  Synthetic
  modified_base (11)..(11): methylated C nucleotide
  modified_base (14)..(14): methylated C nucleotide
tccctcctagcgccggg

SEQ ID NO: 471 - skipped

SEQ ID NO: 472 - DNA, 15 bp, Artificial Sequence
  Synthetic
  modified_base (9)..(9): methylated C nucleotide
  modified_base (12)..(12): methylated C nucleotide
cctcctagcgccggg

SEQ ID NO: 473 - DNA, 23 bp, Artificial Sequence
  Synthetic
  modified_base (7)..(7): methylated C nucleotide
  modified_base (19)..(19): methylated C nucleotide
  modified_base (22)..(22): methylated C nucleotide
tgggtgcgtccctcctagcgccg

SEQ ID NO: 474 - DNA, 21 bp, Artificial Sequence
  Synthetic
  modified_base (7)..(7): methylated C nucleotide
  modified_base (19)..(19): methylated C nucleotide
tgggtgcgtccctcctagcgc

SEQ ID NO: 475 - DNA, 19 bp, Artificial Sequence
  Synthetic
  modified_base (7)..(7): methylated C nucleotide
  modified_base (19)..(19): methylated C nucleotide
tgggtgcgtccctcctagc

SEQ ID NO: 476 - DNA, 17 bp, Artificial Sequence
  Synthetic
  modified_base (7)..(7): methylated C nucleotide
tgggtgcgtccctccta

SEQ ID NO: 477 - DNA, 15 bp, Artificial Sequence
  Synthetic
  modified_base (7)..(7): methylated C nucleotide
tgggtgcgtccctcc

SEQ ID NO: 478 - DNA, 25 bp, Artificial Sequence
  Synthetic
  modified_base (7)..(7): methylated C nucleotide
  modified_base (19)..(19): methylated C nucleotide
  modified_base (22)..(22): methylated C nucleotide
tgggtgcatccctcctagcgccggg

SEQ ID NO: 479 - DNA, 25 bp, Artificial Sequence
  Synthetic
  modified_base (7)..(7): methylated C nucleotide
  modified_base (19)..(19): methylated C nucleotide
  modified_base (22)..(22): methylated C nucleotide
tgtgtgcgtccctcctagcgccggg

SEQ ID NO: 480 - DNA, 25 bp, Artificial Sequence
  Synthetic
  modified_base (7)..(7): methylated C nucleotide
  modified_base (19)..(19): methylated C nucleotide
  modified_base (22)..(22): methylated C nucleotide
tgggtgcgtccctcctaccgccggg

SEQ ID NO: 481 - DNA, 26 bp, Artificial Sequence
  Synthetic
  modified_base (3)..(3): methylated C nucleotide
  modified_base (6)..(6): methylated C nucleotide
  modified_base (20)..(20): methylated C nucleotide
ttcgccgcaggcctgggtgcgtccct

SEQ ID NO: 482 - DNA, 27 bp, Artificial Sequence
  Synthetic
  modified_base (4)..(4): methylated C nucleotide
  modified_base (7)..(7): methylated C nucleotide
  modified_base (21)..(21): methylated C nucleotide
cttcgccgcaggcctgggtgcgtccct

SEQ ID NO: 483 - DNA, 28 bp, Artificial Sequence
  Synthetic
  modified_base (5)..(5): methylated C nucleotide
  modified_base (8)..(8): methylated C nucleotide
  modified_base (22)..(22): methylated C nucleotide
tcttcgccgcaggcctgggtgcgtccct

SEQ ID NO: 484 - DNA, 29 bp, Artificial Sequence
  Synthetic
  modified_base (6)..(6): methylated C nucleotide
  modified_base (9)..(9): methylated C nucleotide
  modified_base (23)..(23): methylated C nucleotide
ctcttcgccgcaggcctgggtgcgtccct

SEQ ID NO: 485 - DNA, 30 bp, Artificial Sequence
  Synthetic
  modified_base (7)..(7): methylated C nucleotide
  modified_base (10)..(10): methylated C nucleotide
  modified_base (24)..(24): methylated C nucleotide
tctcttcgccgcaggcctgggtgcgtccct

SEQ ID NO: 486 - DNA, 31 bp, Artificial Sequence
  Synthetic
  modified_base (8)..(8): methylated C nucleotide
  modified_base (11)..(11): methylated C nucleotide
  modified_base (25)..(25): methylated C nucleotide
ctctcttcgccgcaggcctgggtgcgtccct

SEQ ID NO: 487 - DNA, 27 bp, Artificial Sequence
  Synthetic
  modified_base (3)..(3): methylated C nucleotide
  modified_base (6)..(6): methylated C nucleotide
  modified_base (20)..(20): methylated C nucleotide
ttcgccgcaggcctgggtgcgtccctc

SEQ ID NO: 488 - DNA, 28 bp, Artificial Sequence
  Synthetic
  modified_base (3)..(3): methylated C nucleotide
  modified_base (6)..(6): methylated C nucleotide
  modified_base (20)..(20): methylated C nucleotide
ttcgccgcaggcctgggtgcgtccctcc

SEQ ID NO: 489 - DNA, 29 bp, Artificial Sequence
  Synthetic
  modified_base (3)..(3): methylated C nucleotide
  modified_base (6)..(6): methylated C nucleotide
  modified_base (20)..(20): methylated C nucleotide
ttcgccgcaggcctgggtgcgtccctcct

SEQ ID NO: 490 - DNA, 30 bp, Artificial Sequence
  Synthetic
  modified_base (3)..(3): methylated C nucleotide
  modified_base (6)..(6): methylated C nucleotide
  modified_base (20)..(20): methylated C nucleotide
ttcgccgcaggcctgggtgcgtccctccta

SEQ ID NO: 491 - DNA, 31 bp, Artificial Sequence
  Synthetic
  modified_base (3)..(3): methylated C nucleotide
  modified_base (6)..(6): methylated C nucleotide
  modified_base (20)..(20): methylated C nucleotide
ttcgccgcaggcctgggtgcgtccctcctag

SEQ ID NO: 492 - DNA, 28 bp, Artificial Sequence
  Synthetic
  modified_base (4)..(4): methylated C nucleotide
  modified_base (7)..(7): methylated C nucleotide
  modified_base (21)..(21): methylated C nucleotide
cttcgccgcaggcctgggtgcgtccctc

SEQ ID NO: 493 - DNA, 30 bp, Artificial Sequence
  Synthetic
  modified_base (5)..(5): methylated C nucleotide
  modified_base (8)..(8): methylated C nucleotide
  modified_base (22)..(22): methylated C nucleotide
tcttcgccgcaggcctgggtgcgtccctcc

SEQ ID NO: 494 - DNA, 32 bp, Artificial Sequence
  Synthetic
  modified_base (6)..(6): methylated C nucleotide
  modified_base (9)..(9): methylated C nucleotide
  modified_base (23)..(23): methylated C nucleotide
ctcttcgccgcaggcctgggtgcgtccctcct

SEQ ID NO: 495 - DNA, 34 bp, Artificial Sequence
  Synthetic
  modified_base (7)..(7): methylated C nucleotide
  modified_base (10)..(10): methylated C nucleotide
  modified_base (24)..(24): methylated C nucleotide
tctcttcgccgcaggcctgggtgcgtccctccta

SEQ ID NO: 496 - DNA, 36 bp, Artificial Sequence
  Synthetic
  modified_base (8)..(8): methylated C nucleotide
  modified_base (11)..(11): methylated C nucleotide
  modified_base (25)..(25): methylated C nucleotide
ctctcttcgccgcaggcctgggtgcgtccctcctag

SEQ ID NO: 497 - DNA, 26 bp, Artificial Sequence
  Synthetic
  modified_base (6)..(6): methylated C nucleotide
  modified_base (9)..(9): methylated C nucleotide
  modified_base (23)..(23): methylated C nucleotide
ctcttcgccgcaggcctgggtgcgtc

SEQ ID NO: 498 - DNA, 26 bp, Artificial Sequence
  Synthetic
  modified_base (9)..(9): methylated C nucleotide
  modified_base (12)..(12): methylated C nucleotide
  modified_base (26)..(26): methylated C nucleotide
cctctcttcgccgcaggcctgggtgc

SEQ ID NO: 499 - DNA, 26 bp, Artificial Sequence
  Synthetic
  modified_base (12)..(12): methylated C nucleotide
  modified_base (15)..(15): methylated C nucleotide
ctccctctcttcgccgcaggcctggg

SEQ ID NO: 500 - DNA, 26 bp, Artificial Sequence
  Synthetic
  modified_base (15)..(15): methylated C nucleotide
  modified_base (18)..(18): methylated C nucleotide
tttctccctctcttcgccgcaggcct

SEQ ID NO: 501 - DNA, 26 bp, Artificial Sequence
  Synthetic
  modified_base (18)..(18): methylated C nucleotide
  modified_base (21)..(21): methylated C nucleotide
cactttctccctctcttcgccgcagg

SEQ ID NO: 502 - DNA, 26 bp, Artificial Sequence
  Synthetic
  modified_base (3)..(3): methylated C nucleotide
  modified_base (17)..(17): methylated C nucleotide
gccgcaggcctgggtgcgtccctcct

SEQ ID NO: 503 - DNA, 26 bp, Artificial Sequence
  Synthetic
  modified_base (14)..(14): methylated C nucleotide
gcaggcctgggtgcgtccctcctagc

SEQ ID NO: 504 - DNA, 26 bp, Artificial Sequence
  Synthetic
  modified_base (11)..(11): methylated C nucleotide
ggcctgggtgcgtccctcctagcgcc

SEQ ID NO: 505 - DNA, 26 bp, Artificial Sequence
  Synthetic
  modified_base (8)..(8): methylated C nucleotide
ctgggtgcgtccctcctagcgccggg

SEQ ID NO: 506 - DNA, 26 bp, Artificial Sequence
  Synthetic
  modified_base (5)..(5): methylated C nucleotide
ggtgcgtccctcctagcgccgggaag

SEQ ID NO: 507 - DNA, 24 bp, Artificial Sequence
  Synthetic
  modified_base (1)..(1): methylated C nucleotide
  modified_base (4)..(4): methylated C nucleotide
  modified_base (18)..(18): methylated C nucleotide
cgccgcaggcctgggtgcgtccct

SEQ ID NO: 508 - DNA, 22 bp, Artificial Sequence
  Synthetic
  modified_base (2)..(2): methylated C nucleotide
  modified_base (16)..(16): methylated C nucleotide
ccgcaggcctgggtgcgtccct

SEQ ID NO: 509 - DNA, 20 bp, Artificial Sequence
  Synthetic
  modified_base (14)..(14): methylated C nucleotide
gcaggcctgggtgcgtccct

SEQ ID NO: 510 - DNA, 18 bp, Artificial Sequence
  Synthetic
  modified_base (12)..(12): methylated C nucleotide
aggcctgggtgcgtccct

SEQ ID NO: 511 - DNA, 16 bp, Artificial Sequence
  Synthetic
  modified_base (10)..(10): methylated C nucleotide
gcctgggtgcgtccct

SEQ ID NO: 512 - DNA, 15 bp, Artificial Sequence
  Synthetic
  modified_base (9)..(9): methylated C nucleotide
cctgggtgcgtccct

SEQ ID NO: 513 - DNA, 24 bp, Artificial Sequence
  Synthetic
  modified_base (3)..(3): methylated C nucleotide
  modified_base (6)..(6): methylated C nucleotide
  modified_base (20)..(20): methylated C nucleotide
ttcgccgcaggcctgggtgcgtcc

SEQ ID NO: 514 - DNA, 22 bp, Artificial Sequence
  Synthetic
  modified_base (3)..(3): methylated C nucleotide
  modified_base (6)..(6): methylated C nucleotide
  modified_base (20)..(20): methylated C nucleotide
ttcgccgcaggcctgggtgcgt

SEQ ID NO: 515 - DNA, 20 bp, Artificial Sequence
  Synthetic
  modified_base (3)..(3): methylated C nucleotide
  modified_base (6)..(6): methylated C nucleotide
  modified_base (20)..(20): methylated C nucleotide
ttcgccgcaggcctgggtgc

SEQ ID NO: 516 - DNA, 18 bp, Artificial Sequence
  Synthetic
  modified_base (3)..(3): methylated C nucleotide
  modified_base (6)..(6): methylated C nucleotide
ttcgccgcaggcctgggt

SEQ ID NO: 517 - DNA, 16 bp, Artificial Sequence
  Synthetic
  modified_base (3)..(3): methylated C nucleotide
  modified_base (6)..(6): methylated C nucleotide
ttcgccgcaggcctgg

SEQ ID NO: 518 - DNA, 15 bp, Artificial Sequence
  Synthetic
  modified_base (3)..(3): methylated C nucleotide
  modified_base (6)..(6): methylated C nucleotide
ttcgccgcaggcctg

SEQ ID NO: 519 - DNA, 26 bp, Artificial Sequence
  Synthetic
  modified_base (3)..(3): methylated C nucleotide
  modified_base (6)..(6): methylated C nucleotide
  modified_base (20)..(20): methylated C nucleotide
ttcaccgcaggcctgggtgcgtccct

SEQ ID NO: 520 - DNA, 26 bp, Artificial Sequence
  Synthetic
  modified_base (3)..(3): methylated C nucleotide
  modified_base (6)..(6): methylated C nucleotide
  modified_base (20)..(20): methylated C nucleotide
ttcgccgcaggcctgtgtgcgtccct

SEQ ID NO: 521 - DNA, 26 bp, Artificial Sequence
  Synthetic
  modified_base (3)..(3): methylated C nucleotide
  modified_base (6)..(6): methylated C nucleotide
  modified_base (20)..(20): methylated C nucleotide
ttcgccgcaggcctgggtgcgtacct

SEQ ID NO: 522 - DNA, 24 bp, Artificial Sequence
  Synthetic
  modified_base (13)..(13): methylated C nucleotide
  modified_base (20)..(20): methylated C nucleotide
tgccccctcccccggagtccggga

SEQ ID NO: 523 - DNA, 25 bp, Artificial Sequence
  Synthetic
  modified_base (14)..(14): methylated C nucleotide
  modified_base (21)..(21): methylated C nucleotide
ctgccccctcccccggagtccggga

SEQ ID NO: 524 - DNA, 26 bp, Artificial Sequence
  Synthetic
  modified_base (15)..(15): methylated C nucleotide
  modified_base (22)..(22): methylated C nucleotide
tctgccccctcccccggagtccggga

SEQ ID NO: 525 - DNA, 27 bp, Artificial Sequence
  Synthetic
  modified_base (16)..(16): methylated C nucleotide
  modified_base (23)..(23): methylated C nucleotide
ctctgccccctcccccggagtccggga

SEQ ID NO: 526 - DNA, 28 bp, Artificial Sequence
  Synthetic
  modified_base (17)..(17): methylated C nucleotide
  modified_base (24)..(24): methylated C nucleotide
actctgccccctcccccggagtccggga

SEQ ID NO: 527 - DNA, 29 bp, Artificial Sequence
  Synthetic
  modified_base (18)..(18): methylated C nucleotide
  modified_base (25)..(25): methylated C nucleotide
gactctgccccctcccccggagtccggga

SEQ ID NO: 528 - DNA, 25 bp, Artificial Sequence
  Synthetic
  modified_base (13)..(13): methylated C nucleotide
  modified_base (20)..(20): methylated C nucleotide
tgccccctcccccggagtccgggat

SEQ ID NO: 529 - DNA, 26 bp, Artificial Sequence
  Synthetic
  modified_base (13)..(13): methylated C nucleotide
  modified_base (20)..(20): methylated C nucleotide
tgccccctcccccggagtccgggata

SEQ ID NO: 530 - DNA, 27 bp, Artificial Sequence
  Synthetic
  modified_base (13)..(13): methylated C nucleotide
  modified_base (20)..(20): methylated C nucleotide
tgccccctcccccggagtccgggataa

SEQ ID NO: 531 - DNA, 28 bp, Artificial Sequence
  Synthetic
  modified_base (13)..(13): methylated C nucleotide
  modified_base (20)..(20): methylated C nucleotide
tgccccctcccccggagtccgggataaa

SEQ ID NO: 532 - DNA, 29 bp, Artificial Sequence
  Synthetic
  modified_base (13)..(13): methylated C nucleotide
  modified_base (20)..(20): methylated C nucleotide
tgccccctcccccggagtccgggataaat

SEQ ID NO: 533 - DNA, 26 bp, Artificial Sequence
  Synthetic
  modified_base (14)..(14): methylated C nucleotide
  modified_base (21)..(21): methylated C nucleotide
ctgccccctcccccggagtccgggat

SEQ ID NO: 534 - DNA, 28 bp, Artificial Sequence
  Synthetic
  modified_base (15)..(15): methylated C nucleotide
  modified_base (22)..(22): methylated C nucleotide
tctgccccctcccccggagtccgggata

SEQ ID NO: 535 - DNA, 30 bp, Artificial Sequence
  Synthetic
  modified_base (16)..(16): methylated C nucleotide
  modified_base (23)..(23): methylated C nucleotide
ctctgccccctcccccggagtccgggataa

SEQ ID NO: 536 - DNA, 32 bp, Artificial Sequence
  Synthetic
  modified_base (17)..(17): methylated C nucleotide
  modified_base (24)..(24): methylated C nucleotide
actctgccccctcccccggagtccgggataaa

SEQ ID NO: 537 - DNA, 34 bp, Artificial Sequence
  Synthetic
  modified_base (18)..(18): methylated C nucleotide
  modified_base (25)..(25): methylated C nucleotide
gactctgccccctcccccggagtccgggataaat

SEQ ID NO: 538 - DNA, 24 bp, Artificial Sequence
  Synthetic
  modified_base (16)..(16): methylated C nucleotide
  modified_base (23)..(23): methylated C nucleotide
ctctgccccctcccccggagtccg

SEQ ID NO: 539 - DNA, 24 bp, Artificial Sequence
  Synthetic
  modified_base (19)..(19): methylated C nucleotide
tgactctgccccctcccccggagt

SEQ ID NO: 540 - DNA, 24 bp, Artificial Sequence
  Synthetic
  modified_base (22)..(22): methylated C nucleotide
tggtgactctgccccctcccccgg

SEQ ID NO: 541 - skipped

SEQ ID NO: 542 - DNA, 24 bp, Artificial Sequence
  Synthetic
ggctggtgactctgccccctcccc

SEQ ID NO: 543 - DNA, 24 bp, Artificial Sequence
  Synthetic
agaggctggtgactctgccccctc

SEQ ID NO: 544 - DNA, 24 bp, Artificial Sequence
  Synthetic
  modified_base (10)..(10): methylated C nucleotide
  modified_base (17)..(17): methylated C nucleotide
cccctcccccggagtccgggataa

SEQ ID NO: 545 - DNA, 24 bp, Artificial Sequence
  Synthetic
  modified_base (7)..(7): methylated C nucleotide
  modified_base (14)..(14): methylated C nucleotide
ctcccccggagtccgggataaatt

SEQ ID NO: 546 - DNA, 24 bp, Artificial Sequence
  Synthetic
  modified_base (4)..(4): methylated C nucleotide
  modified_base (11)..(11): methylated C nucleotide
ccccggagtccgggataaattccc

SEQ ID NO: 547 - DNA, 24 bp, Artificial Sequence
  Synthetic
  modified_base (1)..(1): methylated C nucleotide
  modified_base (8)..(8): methylated C nucleotide
cggagtccgggataaattccctag

SEQ ID NO: 548 - DNA, 24 bp, Artificial Sequence
  Synthetic
  modified_base (5)..(5): methylated C nucleotide
agtccgggataaattccctaggct

SEQ ID NO: 549 - DNA, 22 bp, Artificial Sequence
  Synthetic
  modified_base (11)..(11): methylated C nucleotide
  modified_base (18)..(18): methylated C nucleotide
ccccctcccccggagtccggga

SEQ ID NO: 550 - DNA, 20 bp, Artificial Sequence
  Synthetic
  modified_base (9)..(9): methylated C nucleotide
  modified_base (16)..(16): methylated C nucleotide
ccctcccccggagtccggga

SEQ ID NO: 551 - DNA, 18 bp, Artificial Sequence
  Synthetic
  modified_base (7)..(7): methylated C nucleotide
  modified_base (14)..(14): methylated C nucleotide
ctcccccggagtccggga

SEQ ID NO: 552 - DNA, 16 bp, Artificial Sequence
  Synthetic
  modified_base (5)..(5): methylated C nucleotide
  modified_base (12)..(12): methylated C nucleotide
cccccggagtccggga

SEQ ID NO: 553 - DNA, 15 bp, Artificial Sequence
  Synthetic
  modified_base (4)..(4): methylated C nucleotide
  modified_base (11)..(11): methylated C nucleotide
ccccggagtccggga

SEQ ID NO: 554 - DNA, 22 bp, Artificial Sequence
  Synthetic
  modified_base (13)..(13): methylated C nucleotide
  modified_base (20)..(20): methylated C nucleotide
tgccccctcccccggagtccgg

SEQ ID NO: 555 - DNA, 20 bp, Artificial Sequence
  Synthetic
  modified_base (13)..(13): methylated C nucleotide
  modified_base (20)..(20): methylated C nucleotide
tgccccctcccccggagtcc

SEQ ID NO: 556 - DNA, 18 bp, Artificial Sequence
  Synthetic
  modified_base (13)..(13): methylated C nucleotide
tgccccctcccccggagt

SEQ ID NO: 557 - DNA, 16 bp, Artificial Sequence
  Synthetic
  modified_base (13)..(13): methylated C nucleotide
tgccccctcccccgga

SEQ ID NO: 558 - DNA, 15 bp, Artificial Sequence
  Synthetic
  modified_base (13)..(13): methylated C nucleotide
tgccccctcccccgg

SEQ ID NO: 559 - DNA, 24 bp, Artificial Sequence
  Synthetic
  modified_base (13)..(13): methylated C nucleotide
  modified_base (20)..(20): methylated C nucleotide
tgccccctctcccggagtccggga

SEQ ID NO: 560 - DNA, 24 bp, Artificial Sequence
  Synthetic
  modified_base (13)..(13): methylated C nucleotide
  modified_base (20)..(20): methylated C nucleotide
tgccccctcccccggagtacggga

SEQ ID NO: 561 - DNA, 24 bp, Artificial Sequence
  Synthetic
  modified_base (13)..(13): methylated C nucleotide
  modified_base (20)..(20): methylated C nucleotide
tgcccgctcccccggagtccggga

SEQ ID NO: 562 - DNA, 33 bp, Artificial Sequence; identical to SEQ ID NO: 36
  Synthetic
  modified_base (13)..(13): methylated C nucleotide
  modified_base (15)..(15): methylated C nucleotide
  modified_base (26)..(26): methylated C nucleotide

SEQ ID NO: 563 - DNA, 34 bp, Artificial Sequence
  Synthetic
  modified_base (14)..(14): methylated C nucleotide
  modified_base (16)..(16): methylated C nucleotide
  modified_base (27)..(27): methylated C nucleotide
gattgggagcaagcgcgctcccagctcgccccct

SEQ ID NO: 564 - DNA, 35 bp, Artificial Sequence
  Synthetic
  modified_base (15)..(15): methylated C nucleotide
  modified_base (17)..(17): methylated C nucleotide
  modified_base (28)..(28): methylated C nucleotide
tgattgggagcaagcgcgctcccagctcgccccct

SEQ ID NO: 565 - DNA, 36 bp, Artificial Sequence
  Synthetic
  modified_base (16)..(16): methylated C nucleotide
  modified_base (18)..(18): methylated C nucleotide
  modified_base (29)..(29): methylated C nucleotide
gtgattgggagcaagcgcgctcccagctcgccccct

SEQ ID NO: 566 - DNA, 37 bp, Artificial Sequence
  Synthetic
  modified_base (17)..(17): methylated C nucleotide
  modified_base (19)..(19): methylated C nucleotide
  modified_base (30)..(30): methylated C nucleotide
tgtgattgggagcaagcgcgctcccagctcgccccct

SEQ ID NO: 567 - DNA, 38 bp, Artificial Sequence
  Synthetic
  modified_base (18)..(18): methylated C nucleotide
  modified_base (20)..(20): methylated C nucleotide
  modified_base (31)..(31): methylated C nucleotide
ctgtgattgggagcaagcgcgctcccagctcgccccct

SEQ ID NO: 568 - DNA, 34 bp, Artificial Sequence
  Synthetic
  modified_base (13)..(13): methylated C nucleotide
  modified_base (15)..(15): methylated C nucleotide
  modified_base (26)..(26): methylated C nucleotide
attgggagcaagcgcgctcccagctcgccccctc

SEQ ID NO: 569 - DNA, 35 bp, Artificial Sequence
  Synthetic
  modified_base (13)..(13): methylated C nucleotide
  modified_base (15)..(15): methylated C nucleotide
  modified_base (26)..(26): methylated C nucleotide
attgggagcaagcgcgctcccagctcgccccctcc

SEQ ID NO: 570 - DNA, 36 bp, Artificial Sequence
  Synthetic
  modified_base (13)..(13): methylated C nucleotide
  modified_base (15)..(15): methylated C nucleotide
  modified_base (26)..(26): methylated C nucleotide
attgggagcaagcgcgctcccagctcgccccctcca

SEQ ID NO: 571 - DNA, 37 bp, Artificial Sequence
  Synthetic
  modified_base (13)..(13): methylated C nucleotide
  modified_base (15)..(15): methylated C nucleotide
  modified_base (26)..(26): methylated C nucleotide
attgggagcaagcgcgctcccagctcgccccctccaa

SEQ ID NO: 572 - DNA, 38 bp, Artificial Sequence
  Synthetic
  modified_base (13)..(13): methylated C nucleotide
  modified_base (15)..(15): methylated C nucleotide
  modified_base (26)..(26): methylated C nucleotide
attgggagcaagcgcgctcccagctcgccccctccaac

SEQ ID NO: 573 - DNA, 35 bp, Artificial Sequence
  Synthetic
gattgggagcaagcgcgctcccagctcgccccctc

SEQ ID NO: 574 - DNA, 37 bp, Artificial Sequence
  Synthetic
tgattgggagcaagcgcgctcccagctcgccccctcc

SEQ ID NO: 575 - DNA, 39 bp, Artificial Sequence
  Synthetic
gtgattgggagcaagcgcgctcccagctcgccccctcca

SEQ ID NO: 576 - DNA, 41 bp, Artificial Sequence
  Synthetic
tgtgattgggagcaagcgcgctcccagctcgccccctccaa

SEQ ID NO: 577 - DNA, 43 bp, Artificial Sequence
  Synthetic
ctgtgattgggagcaagcgcgctcccagctcgccccctccaac

SEQ ID NO: 578 - DNA, 33 bp, Artificial Sequence
  Synthetic
  modified_base (16)..(16): methylated C nucleotide
  modified_base (18)..(18): methylated C nucleotide
  modified_base (29)..(29): methylated C nucleotide
gtgattgggagcaagcgcgctcccagctcgccc

SEQ ID NO: 579 - DNA, 33 bp, Artificial Sequence
  Synthetic
  modified_base (19)..(19): methylated C nucleotide
  modified_base (21)..(21): methylated C nucleotide
  modified_base (32)..(32): methylated C nucleotide
cctgtgattgggagcaagcgcgctcccagctcg

SEQ ID NO: 580 - DNA, 33 bp, Artificial Sequence
  Synthetic
  modified_base (22)..(22): methylated C nucleotide
  modified_base (24)..(24): methylated C nucleotide
tctcctgtgattgggagcaagcgcgctcccagc

SEQ ID NO: 581 - DNA, 33 bp, Artificial Sequence
  Synthetic
  modified_base (25)..(25): methylated C nucleotide
  modified_base (27)..(27): methylated C nucleotide
ccttctcctgtgattgggagcaagcgcgctccc

SEQ ID NO: 582 - DNA, 33 bp, Artificial Sequence
  Synthetic
  modified_base (28)..(28): methylated C nucleotide
  modified_base (30)..(30): methylated C nucleotide
cctccttctcctgtgattgggagcaagcgcgct

SEQ ID NO: 583 - DNA, 33 bp, Artificial Sequence
  Synthetic
  modified_base (10)..(10): methylated C nucleotide
  modified_base (12)..(12): methylated C nucleotide
  modified_base (23)..(23): methylated C nucleotide
gggagcaagcgcgctcccagctcgccccctcca

SEQ ID NO: 584 - DNA, 33 bp, Artificial Sequence
  Synthetic
  modified_base (7)..(7): methylated C nucleotide
  modified_base (9)..(9): methylated C nucleotide
  modified_base (20)..(20): methylated C nucleotide
agcaagcgcgctcccagctcgccccctccaact

SEQ ID NO: 585 - DNA, 33 bp, Artificial Sequence
  Synthetic
  modified_base (4)..(4): methylated C nucleotide
  modified_base (6)..(6): methylated C nucleotide
  modified_base (17)..(17): methylated C nucleotide
aagcgcgctcccagctcgccccctccaactgca

SEQ ID NO: 586 - DNA, 33 bp, Artificial Sequence
  Synthetic
  modified_base (1)..(1): methylated C nucleotide
  modified_base (3)..(3): methylated C nucleotide
  modified_base (14)..(14): methylated C nucleotide
cgcgctcccagctcgccccctccaactgcattc

SEQ ID NO: 587 - DNA, 33 bp, Artificial Sequence
  Synthetic
  modified_base (11)..(11): methylated C nucleotide
gctcccagctcgccccctccaactgcattccaa

SEQ ID NO: 588 - DNA, 31 bp, Artificial Sequence
  Synthetic
  modified_base (11)..(11): methylated C nucleotide
  modified_base (13)..(13): methylated C nucleotide
  modified_base (24)..(24): methylated C nucleotide
tgggagcaagcgcgctcccagctcgccccct

SEQ ID NO: 589 - DNA, 29 bp, Artificial Sequence
  Synthetic
  modified_base (9)..(9): methylated C nucleotide
  modified_base (11)..(11): methylated C nucleotide
  modified_base (22)..(22): methylated C nucleotide
ggagcaagcgcgctcccagctcgccccct

SEQ ID NO: 590 - DNA, 27 bp, Artificial Sequence
  Synthetic
  modified_base (7)..(7): methylated C nucleotide
  modified_base (9)..(9): methylated C nucleotide
  modified_base (20)..(20): methylated C nucleotide
agcaagcgcgctcccagctcgccccct

SEQ ID NO: 591 - DNA, 25 bp, Artificial Sequence
  Synthetic
  modified_base (5)..(5): methylated C nucleotide
  modified_base (7)..(7): methylated C nucleotide
  modified_base (18)..(18): methylated C nucleotide
caagcgcgctcccagctcgccccct

SEQ ID NO: 592 - DNA, 23 bp, Artificial Sequence
  Synthetic
  modified_base (3)..(3): methylated C nucleotide
  modified_base (5)..(5): methylated C nucleotide
  modified_base (16)..(16): methylated C nucleotide
agcgcgctcccagctcgccccct

SEQ ID NO: 593 - DNA, 21 bp, Artificial Sequence
  Synthetic
  modified_base (1)..(1): methylated C nucleotide
  modified_base (3)..(3): methylated C nucleotide
  modified_base (14)..(14): methylated C nucleotide
cgcgctcccagctcgccccct

SEQ ID NO: 594 - DNA, 19 bp, Artificial Sequence
  Synthetic
  modified_base (1)..(1): methylated C nucleotide
  modified_base (12)..(12): methylated C nucleotide
cgctcccagctcgccccct

SEQ ID NO: 595 - DNA, 17 bp, Artificial Sequence
  Synthetic
  modified_base (10)..(10): methylated C nucleotide
ctcccagctcgccccct

SEQ ID NO: 596 - DNA, 15 bp, Artificial Sequence
  Synthetic
  modified_base (8)..(8): methylated C nucleotide
cccagctcgccccct

SEQ ID NO: 597 - DNA, 31 bp, Artificial Sequence
  Synthetic
  modified_base (13)..(13): methylated C nucleotide
  modified_base (15)..(15): methylated C nucleotide
  modified_base (26)..(26): methylated C nucleotide
attgggagcaagcgcgctcccagctcgcccc

SEQ ID NO: 598 - DNA, 29 bp, Artificial Sequence
  Synthetic
  modified_base (13)..(13): methylated C nucleotide
  modified_base (15)..(15): methylated C nucleotide
  modified_base (26)..(26): methylated C nucleotide
attgggagcaagcgcgctcccagctcgcc

SEQ ID NO: 599 - DNA, 27 bp, Artificial Sequence
  Synthetic
  modified_base (13)..(13): methylated C nucleotide
  modified_base (15)..(15): methylated C nucleotide
  modified_base (26)..(26): methylated C nucleotide
attgggagcaagcgcgctcccagctcg

SEQ ID NO: 600 - DNA, 25 bp, Artificial Sequence
  Synthetic
  modified_base (13)..(13): methylated C nucleotide
  modified_base (15)..(15): methylated C nucleotide
attgggagcaagcgcgctcccagct

SEQ ID NO: 601 - DNA, 23 bp, Artificial Sequence
  Synthetic
  modified_base (13)..(13): methylated C nucleotide
  modified_base (15)..(15): methylated C nucleotide
attgggagcaagcgcgctcccag

SEQ ID NO: 602 - DNA, 21 bp, Artificial Sequence
  Synthetic
  modified_base (13)..(13): methylated C nucleotide
  modified_base (15)..(15): methylated C nucleotide
attgggagcaagcgcgctccc

SEQ ID NO: 603 - DNA, 19 bp, Artificial Sequence
  Synthetic
  modified_base (13)..(13): methylated C nucleotide
  modified_base (15)..(15): methylated C nucleotide
attgggagcaagcgcgctc

SEQ ID NO: 604 - DNA, 17 bp, Artificial Sequence
  Synthetic
  modified_base (13)..(13): methylated C nucleotide
  modified_base (15)..(15): methylated C nucleotide
attgggagcaagcgcgc

SEQ ID NO: 605 - DNA, 15 bp, Artificial Sequence
  Synthetic
  modified_base (13)..(13): methylated C nucleotide
  modified_base (15)..(15): methylated C nucleotide
attgggagcaagcgc

SEQ ID NO: 606 - DNA, 33 bp, Artificial Sequence
  Synthetic
  modified_base (13)..(13): methylated C nucleotide
  modified_base (15)..(15): methylated C nucleotide
  modified_base (26)..(26): methylated C nucleotide
gttgggagcaagcgcgctcccagctcgccccct

SEQ ID NO: 607 - DNA, 33 bp, Artificial Sequence
  Synthetic
  modified_base (13)..(13): methylated C nucleotide
  modified_base (15)..(15): methylated C nucleotide
  modified_base (26)..(26): methylated C nucleotide
attgggagcaagcgcgctccctgctcgccccct

SEQ ID NO: 608 - DNA, 33 bp, Artificial Sequence
  Synthetic
  modified_base (13)..(13): methylated C nucleotide
  modified_base (15)..(15): methylated C nucleotide
  modified_base (26)..(26): methylated C nucleotide
attgggagcacgcgcgctcccagctcgccccct

SEQ ID NO: 609 - DNA, 35 bp, Artificial Sequence; identical to SEQ ID NO: 37
  Synthetic
  modified_base (2)..(2): methylated C nucleotide
  modified_base (4)..(4): methylated C nucleotide
  modified_base (18)..(18): methylated C nucleotide
  modified_base (30)..(30): methylated C nucleotide
  modified_base (33)..(33): methylated C nucleotide

SEQ ID NO: 610 - DNA, 36 bp, Artificial Sequence
  Synthetic
  modified_base (3)..(3): methylated C nucleotide
  modified_base (5)..(5): methylated C nucleotide
  modified_base (19)..(19): methylated C nucleotide
  modified_base (31)..(31): methylated C nucleotide
  modified_base (34)..(34): methylated C nucleotide
ttcgcgcaggcctgggtgcgtccctcctagcgccgg

SEQ ID NO: 611 - DNA, 37 bp, Artificial Sequence
  Synthetic
  modified_base (4)..(4): methylated C nucleotide
  modified_base (6)..(6): methylated C nucleotide
  modified_base (20)..(20): methylated C nucleotide
  modified_base (32)..(32): methylated C nucleotide
  modified_base (35)..(35): methylated C nucleotide
cttcgcgcaggcctgggtgcgtccctcctagcgccgg

SEQ ID NO: 612 - DNA, 38 bp, Artificial Sequence
  Synthetic
  modified_base (5)..(5): methylated C nucleotide
  modified_base (7)..(7): methylated C nucleotide
  modified_base (21)..(21): methylated C nucleotide
  modified_base (33)..(33): methylated C nucleotide
  modified_base (36)..(36): methylated C nucleotide
tcttcgcgcaggcctgggtgcgtccctcctagcgccgg

SEQ ID NO: 613 - DNA, 39 bp, Artificial Sequence
  Synthetic
  modified_base (6)..(6): methylated C nucleotide
  modified_base (8)..(8): methylated C nucleotide
  modified_base (22)..(22): methylated C nucleotide
  modified_base (34)..(34): methylated C nucleotide
  modified_base (37)..(37): methylated C nucleotide
ctcttcgcgcaggcctgggtgcgtccctcctagcgccgg

SEQ ID NO: 614 - DNA, 40 bp, Artificial Sequence
  Synthetic
  modified_base (7)..(7): methylated C nucleotide
  modified_base (9)..(9): methylated C nucleotide
  modified_base (23)..(23): methylated C nucleotide
  modified_base (35)..(35): methylated C nucleotide
  modified_base (38)..(38): methylated C nucleotide
tctcttcgcgcaggcctgggtgcgtccctcctagcgccgg

SEQ ID NO: 615 - DNA, 36 bp, Artificial Sequence
  Synthetic
  modified_base (2)..(2): methylated C nucleotide
  modified_base (4)..(4): methylated C nucleotide
  modified_base (18)..(18): methylated C nucleotide
  modified_base (30)..(30): methylated C nucleotide
  modified_base (33)..(33): methylated C nucleotide
tcgcgcaggcctgggtgcgtccctcctagcgccggg

SEQ ID NO: 616 - DNA, 37 bp, Artificial Sequence
  Synthetic
  modified_base (2)..(2): methylated C nucleotide
  modified_base (4)..(4): methylated C nucleotide
  modified_base (18)..(18): methylated C nucleotide
  modified_base (30)..(30): methylated C nucleotide
  modified_base (33)..(33): methylated C nucleotide
tcgcgcaggcctgggtgcgtccctcctagcgccggga

SEQ ID NO: 617 - DNA, 38 bp, Artificial Sequence
  Synthetic
  modified_base (2)..(2): methylated C nucleotide
  modified_base (4)..(4): methylated C nucleotide
  modified_base (18)..(18): methylated C nucleotide
  modified_base (30)..(30): methylated C nucleotide
  modified_base (33)..(33): methylated C nucleotide
tcgcgcaggcctgggtgcgtccctcctagcgccgggaa

SEQ ID NO: 618 - DNA, 39 bp, Artificial Sequence
  Synthetic
  modified_base (2)..(2): methylated C nucleotide
  modified_base (4)..(4): methylated C nucleotide
  modified_base (18)..(18): methylated C nucleotide
  modified_base (30)..(30): methylated C nucleotide
  modified_base (33)..(33): methylated C nucleotide
tcgcgcaggcctgggtgcgtccctcctagcgccgggaag

SEQ ID NO: 619 - DNA, 40 bp, Artificial Sequence
  Synthetic
  modified_base (2)..(2): methylated C nucleotide
  modified_base (4)..(4): methylated C nucleotide
  modified_base (18)..(18): methylated C nucleotide
  modified_base (30)..(30): methylated C nucleotide
  modified_base (33)..(33): methylated C nucleotide
tcgcgcaggcctgggtgcgtccctcctagcgccgggaagc

SEQ ID NO: 620 - DNA, 37 bp, Artificial Sequence
  Synthetic
  modified_base (3)..(3): methylated C nucleotide
  modified_base (5)..(5): methylated C nucleotide
  modified_base (19)..(19): methylated C nucleotide
  modified_base (31)..(31): methylated C nucleotide
  modified_base (34)..(34): methylated C nucleotide
ttcgcgcaggcctgggtgcgtccctcctagcgccggg

SEQ ID NO: 621 - DNA, 39 bp, Artificial Sequence
  Synthetic
  modified_base (4)..(4): methylated C nucleotide
  modified_base (6)..(6): methylated C nucleotide
  modified_base (20)..(20): methylated C nucleotide
  modified_base (32)..(32): methylated C nucleotide
  modified_base (35)..(35): methylated C nucleotide
cttcgcgcaggcctgggtgcgtccctcctagcgccggga

SEQ ID NO: 622 - DNA, 41 bp, Artificial Sequence
  Synthetic
  modified_base (5)..(5): methylated C nucleotide
  modified_base (7)..(7): methylated C nucleotide
  modified_base (21)..(21): methylated C nucleotide
  modified_base (33)..(33): methylated C nucleotide
  modified_base (36)..(36): methylated C nucleotide
tcttcgcgcaggcctgggtgcgtccctcctagcgccgggaa

SEQ ID NO: 623 - DNA, 43 bp, Artificial Sequence
  Synthetic
  modified_base (6)..(6): methylated C nucleotide
  modified_base (8)..(8): methylated C nucleotide
  modified_base (22)..(22): methylated C nucleotide
  modified_base (34)..(34): methylated C nucleotide
  modified_base (37)..(37): methylated C nucleotide
ctcttcgcgcaggcctgggtgcgtccctcctagcgccgggaag

SEQ ID NO: 624 - DNA, 45 bp, Artificial Sequence
  Synthetic
  modified_base (7)..(7): methylated C nucleotide
  modified_base (9)..(9): methylated C nucleotide
  modified_base (23)..(23): methylated C nucleotide
  modified_base (35)..(35): methylated C nucleotide
  modified_base (38)..(38): methylated C nucleotide
tctcttcgcgcaggcctgggtgcgtccctcctagcgccgggaagc

SEQ ID NO: 625 - DNA, 35 bp, Artificial Sequence
  Synthetic
  modified_base (5)..(5): methylated C nucleotide
  modified_base (7)..(7): methylated C nucleotide
  modified_base (21)..(21): methylated C nucleotide
  modified_base (33)..(33): methylated C nucleotide
tcttcgcgcaggcctgggtgcgtccctcctagcgc

SEQ ID NO: 626 - DNA, 35 bp, Artificial Sequence
  Synthetic
  modified_base (8)..(8): methylated C nucleotide
  modified_base (10)..(10): methylated C nucleotide
  modified_base (24)..(24): methylated C nucleotide
ctctcttcgcgcaggcctgggtgcgtccctcctag

SEQ ID NO: 627 - DNA, 35 bp, Artificial Sequence
  Synthetic
  modified_base (11)..(11): methylated C nucleotide
  modified_base (13)..(13): methylated C nucleotide
  modified_base (27)..(27): methylated C nucleotide
tccctctcttcgcgcaggcctgggtgcgtccctcc

SEQ ID NO: 628 - DNA, 35 bp, Artificial Sequence
  Synthetic
  modified_base (14)..(14): methylated C nucleotide
  modified_base (16)..(16): methylated C nucleotide
  modified_base (30)..(30): methylated C nucleotide
ttctccctctcttcgcgcaggcctgggtgcgtccc

SEQ ID NO: 629 - DNA, 35 bp, Artificial Sequence
  Synthetic
  modified_base (17)..(17): methylated C nucleotide
  modified_base (19)..(19): methylated C nucleotide
  modified_base (33)..(33): methylated C nucleotide
actttctccctctcttcgcgcaggcctgggtgcgt

SEQ ID NO: 630 - DNA, 35 bp, Artificial Sequence
  Synthetic
  modified_base (1)..(1): methylated C nucleotide
  modified_base (15)..(15): methylated C nucleotide
  modified_base (27)..(27): methylated C nucleotide
  modified_base (30)..(30): methylated C nucleotide
cgcaggcctgggtgcgtccctcctagcgccgggaa

SEQ ID NO: 631 - DNA, 35 bp, Artificial Sequence; identical to SEQ ID NO: 456
  Synthetic
  modified_base (12)..(12): methylated C nucleotide
  modified_base (24)..(24): methylated C nucleotide
  modified_base (27)..(27): methylated C nucleotide

SEQ ID NO: 632 - DNA, 35 bp, Artificial Sequence
  Synthetic
  modified_base (9)..(9): methylated C nucleotide
  modified_base (21)..(21): methylated C nucleotide
  modified_base (24)..(24): methylated C nucleotide
cctgggtgcgtccctcctagcgccgggaagctggg

SEQ ID NO: 633 - DNA, 35 bp, Artificial Sequence
  Synthetic
  modified_base (6)..(6): methylated C nucleotide
  modified_base (18)..(18): methylated C nucleotide
  modified_base (21)..(21): methylated C nucleotide
gggtgcgtccctcctagcgccgggaagctgggttg

SEQ ID NO: 634 - DNA, 35 bp, Artificial Sequence
  Synthetic
  modified_base (3)..(3): methylated C nucleotide
  modified_base (15)..(15): methylated C nucleotide
  modified_base (18)..(18): methylated C nucleotide
tgcgtccctcctagcgccgggaagctgggttgcct

SEQ ID NO: 635 - DNA, 33 bp, Artificial Sequence
  Synthetic
  modified_base (2)..(2): methylated C nucleotide
  modified_base (16)..(16): methylated C nucleotide
  modified_base (28)..(28): methylated C nucleotide
  modified_base (31)..(31): methylated C nucleotide
gcgcaggcctgggtgcgtccctcctagcgccgg

SEQ ID NO: 636 - DNA, 31 bp, Artificial Sequence
  Synthetic
  modified_base (14)..(14): methylated C nucleotide
  modified_base (26)..(26): methylated C nucleotide
  modified_base (29)..(29): methylated C nucleotide
gcaggcctgggtgcgtccctcctagcgccgg

SEQ ID NO: 637 - DNA, 29 bp, Artificial Sequence
  Synthetic
  modified_base (12)..(12): methylated C nucleotide
  modified_base (24)..(24): methylated C nucleotide
  modified_base (27)..(27): methylated C nucleotide
aggcctgggtgcgtccctcctagcgccgg

SEQ ID NO: 638 - DNA, 27 bp, Artificial Sequence
  Synthetic
  modified_base (10)..(10): methylated C nucleotide
  modified_base (22)..(22): methylated C nucleotide
  modified_base (25)..(25): methylated C nucleotide
gcctgggtgcgtccctcctagcgccgg

SEQ ID NO: 639 - DNA, 25 bp, Artificial Sequence
  Synthetic
  modified_base (8)..(8): methylated C nucleotide
  modified_base (20)..(20): methylated C nucleotide
  modified_base (23)..(23): methylated C nucleotide
ctgggtgcgtccctcctagcgccgg

SEQ ID NO: 640 - DNA, 23 bp, Artificial Sequence
  Synthetic
  modified_base (6)..(6): methylated C nucleotide
  modified_base (18)..(18): methylated C nucleotide
  modified_base (21)..(21): methylated C nucleotide
gggtgcgtccctcctagcgccgg

SEQ ID NO: 641 - DNA, 21 bp, Artificial Sequence
  Synthetic
  modified_base (4)..(4): methylated C nucleotide
  modified_base (16)..(16): methylated C nucleotide
  modified_base (19)..(19): methylated C nucleotide
gtgcgtccctcctagcgccgg

SEQ ID NO: 642 - DNA, 19 bp, Artificial Sequence
  Synthetic
  modified_base (2)..(2): methylated C nucleotide
  modified_base (14)..(14): methylated C nucleotide
  modified_base (17)..(17): methylated C nucleotide
gcgtccctcctagcgccgg

SEQ ID NO: 643 - DNA, 17 bp, Artificial Sequence
  Synthetic
  modified_base (12)..(12): methylated C nucleotide
  modified_base (15)..(15): methylated C nucleotide
gtccctcctagcgccgg

SEQ ID NO: 644 - DNA, 15 bp, Artificial Sequence
  Synthetic
  modified_base (10)..(10): methylated C nucleotide
  modified_base (13)..(13): methylated C nucleotide
ccctcctagcgccgg

SEQ ID NO: 645 - DNA, 33 bp, Artificial Sequence
  Synthetic
  modified_base (2)..(2): methylated C nucleotide
  modified_base (4)..(4): methylated C nucleotide
  modified_base (18)..(18): methylated C nucleotide
  modified_base (30)..(30): methylated C nucleotide
  modified_base (33)..(33): methylated C nucleotide
tcgcgcaggcctgggtgcgtccctcctagcgcc

SEQ ID NO: 646 - DNA, 31 bp, Artificial Sequence
  Synthetic
  modified_base (2)..(2): methylated C nucleotide
  modified_base (4)..(4): methylated C nucleotide
  modified_base (18)..(18): methylated C nucleotide
  modified_base (30)..(30): methylated C nucleotide
tcgcgcaggcctgggtgcgtccctcctagcg

SEQ ID NO: 647 - DNA, 29 bp, Artificial Sequence
  Synthetic
  modified_base (2)..(2): methylated C nucleotide
  modified_base (4)..(4): methylated C nucleotide
  modified_base (18)..(18): methylated C nucleotide
tcgcgcaggcctgggtgcgtccctcctag

SEQ ID NO: 648 - DNA, 27 bp, Artificial Sequence
  Synthetic
  modified_base (2)..(2): methylated C nucleotide
  modified_base (4)..(4): methylated C nucleotide
  modified_base (18)..(18): methylated C nucleotide
tcgcgcaggcctgggtgcgtccctcct

SEQ ID NO: 649 - DNA, 25 bp, Artificial Sequence
  Synthetic
  modified_base (2)..(2): methylated C nucleotide
  modified_base (4)..(4): methylated C nucleotide
  modified_base (18)..(18): methylated C nucleotide
tcgcgcaggcctgggtgcgtccctc

SEQ ID NO: 650 - DNA, 23 bp, Artificial Sequence
  Synthetic
  modified_base (2)..(2): methylated C nucleotide
  modified_base (4)..(4): methylated C nucleotide
  modified_base (18)..(18): methylated C nucleotide
tcgcgcaggcctgggtgcgtccc

SEQ ID NO: 651 - DNA, 21 bp, Artificial Sequence
  Synthetic
  modified_base (2)..(2): methylated C nucleotide
  modified_base (4)..(4): methylated C nucleotide
  modified_base (18)..(18): methylated C nucleotide
tcgcgcaggcctgggtgcgtc

SEQ ID NO: 652 - DNA, 19 bp, Artificial Sequence
  Synthetic
  modified_base (2)..(2): methylated C nucleotide
  modified_base (4)..(4): methylated C nucleotide
  modified_base (18)..(18): methylated C nucleotide
tcgcgcaggcctgggtgcg

SEQ ID NO: 653 - DNA, 17 bp, Artificial Sequence
  Synthetic
  modified_base (2)..(2): methylated C nucleotide
  modified_base (4)..(4): methylated C nucleotide
tcgcgcaggcctgggtg

SEQ ID NO: 654 - DNA, 15 bp, Artificial Sequence
  Synthetic
  modified_base (2)..(2): methylated C nucleotide
  modified_base (4)..(4): methylated C nucleotide
tcgcgcaggcctggg

SEQ ID NO: 655 - DNA, 35 bp, Artificial Sequence
  Synthetic
  modified_base (2)..(2): methylated C nucleotide
  modified_base (4)..(4): methylated C nucleotide
  modified_base (18)..(18): methylated C nucleotide
  modified_base (30)..(30): methylated C nucleotide
  modified_base (33)..(33): methylated C nucleotide
tcgcacaggcctgggtgcgtccctcctagcgccgg

SEQ ID NO: 656 - DNA, 35 bp, Artificial Sequence
  Synthetic
  modified_base (2)..(2): methylated C nucleotide
  modified_base (4)..(4): methylated C nucleotide
  modified_base (18)..(18): methylated C nucleotide
  modified_base (30)..(30): methylated C nucleotide
  modified_base (33)..(33): methylated C nucleotide
tcgcgcaggcctgggtgcgcccctcctagcgccgg

SEQ ID NO: 657 - DNA, 35 bp, Artificial Sequence
  Synthetic
  modified_base (2)..(2): methylated C nucleotide
  modified_base (4)..(4): methylated C nucleotide
  modified_base (18)..(18): methylated C nucleotide
  modified_base (30)..(30): methylated C nucleotide
  modified_base (33)..(33): methylated C nucleotide
tcgcgcaggcctgggtgcgtccctccgagcgccgg

SEQ ID NO: 658 - DNA, 34 bp, Artificial Sequence; identical to SEQ ID NO: 38
  Synthetic
  modified_base (2)..(2): methylated C nucleotide
  modified_base (4)..(4): methylated C nucleotide
  modified_base (17)..(17): methylated C nucleotide
  modified_base (29)..(29): methylated C nucleotide
  modified_base (32)..(32): methylated C nucleotide

SEQ ID NO: 659 - DNA, 35 bp, Artificial Sequence
  Synthetic
  modified_base (3)..(3): methylated C nucleotide
  modified_base (5)..(5): methylated C nucleotide
  modified_base (18)..(18): methylated C nucleotide
  modified_base (30)..(30): methylated C nucleotide
  modified_base (33)..(33): methylated C nucleotide
ttcgcgcaggcctgggtcgtccctcctagcgccgg

SEQ ID NO: 660 - DNA, 36 bp, Artificial Sequence
  Synthetic
  modified_base (4)..(4): methylated C nucleotide
  modified_base (6)..(6): methylated C nucleotide
  modified_base (19)..(19): methylated C nucleotide
  modified_base (31)..(31): methylated C nucleotide
  modified_base (34)..(34): methylated C nucleotide
cttcgcgcaggcctgggtcgtccctcctagcgccgg

SEQ ID NO: 661 - DNA, 37 bp, Artificial Sequence
  Synthetic
  modified_base (5)..(5): methylated C nucleotide
  modified_base (7)..(7): methylated C nucleotide
  modified_base (20)..(20): methylated C nucleotide
  modified_base (32)..(32): methylated C nucleotide
  modified_base (35)..(35): methylated C nucleotide
tcttcgcgcaggcctgggtcgtccctcctagcgccgg

SEQ ID NO: 662 - DNA, 38 bp, Artificial Sequence
  Synthetic
  modified_base (6)..(6): methylated C nucleotide
  modified_base (8)..(8): methylated C nucleotide
  modified_base (21)..(21): methylated C nucleotide
  modified_base (33)..(33): methylated C nucleotide
  modified_base (36)..(36): methylated C nucleotide
ctcttcgcgcaggcctgggtcgtccctcctagcgccgg

SEQ ID NO: 663 - DNA, 39 bp, Artificial Sequence
  Synthetic
  modified_base (7)..(7): methylated C nucleotide
  modified_base (9)..(9): methylated C nucleotide
  modified_base (22)..(22): methylated C nucleotide
  modified_base (34)..(34): methylated C nucleotide
  modified_base (37)..(37): methylated C nucleotide
tctcttcgcgcaggcctgggtcgtccctcctagcgccgg

SEQ ID NO: 664 - DNA, 35 bp, Artificial Sequence
  Synthetic
  modified_base (2)..(2): methylated C nucleotide
  modified_base (4)..(4): methylated C nucleotide
  modified_base (17)..(17): methylated C nucleotide
  modified_base (29)..(29): methylated C nucleotide
  modified_base (32)..(32): methylated C nucleotide
tcgcgcaggcctgggtcgtccctcctagcgccggg

SEQ ID NO: 665 - DNA, 36 bp, Artificial Sequence
  Synthetic
  modified_base (2)..(2): methylated C nucleotide
  modified_base (4)..(4): methylated C nucleotide
  modified_base (17)..(17): methylated C nucleotide
  modified_base (29)..(29): methylated C nucleotide
  modified_base (32)..(32): methylated C nucleotide
tcgcgcaggcctgggtcgtccctcctagcgccggga

SEQ ID NO: 666 - DNA, 37 bp, Artificial Sequence
  Synthetic
  modified_base (2)..(2): methylated C nucleotide
  modified_base (4)..(4): methylated C nucleotide
  modified_base (17)..(17): methylated C nucleotide
  modified_base (29)..(29): methylated C nucleotide
  modified_base (32)..(32): methylated C nucleotide
tcgcgcaggcctgggtcgtccctcctagcgccgggaa

SEQ ID NO: 667 - DNA, 38 bp, Artificial Sequence
  Synthetic
  modified_base (2)..(2): methylated C nucleotide
  modified_base (4)..(4): methylated C nucleotide
  modified_base (17)..(17): methylated C nucleotide
  modified_base (29)..(29): methylated C nucleotide
  modified_base (32)..(32): methylated C nucleotide
tcgcgcaggcctgggtcgtccctcctagcgccgggaag

SEQ ID NO: 668 - DNA, 39 bp, Artificial Sequence
  Synthetic
  modified_base (2)..(2): methylated C nucleotide
  modified_base (4)..(4): methylated C nucleotide
  modified_base (17)..(17): methylated C nucleotide
  modified_base (29)..(29): methylated C nucleotide
  modified_base (32)..(32): methylated C nucleotide
tcgcgcaggcctgggtcgtccctcctagcgccgggaagc

SEQ ID NO: 669 - DNA, 36 bp, Artificial Sequence
  Synthetic
  modified_base (3)..(3): methylated C nucleotide
  modified_base (5)..(5): methylated C nucleotide
  modified_base (18)..(18): methylated C nucleotide
  modified_base (30)..(30): methylated C nucleotide
  modified_base (33)..(33): methylated C nucleotide
ttcgcgcaggcctgggtcgtccctcctagcgccggg

SEQ ID NO: 670 - DNA, 38 bp, Artificial Sequence
  Synthetic
  modified_base (4)..(4): methylated C nucleotide
  modified_base (6)..(6): methylated C nucleotide
  modified_base (19)..(19): methylated C nucleotide
  modified_base (31)..(31): methylated C nucleotide
  modified_base (34)..(34): methylated C nucleotide
cttcgcgcaggcctgggtcgtccctcctagcgccggga

SEQ ID NO: 671 - DNA, 40 bp, Artificial Sequence
  Synthetic
  modified_base (5)..(5): methylated C nucleotide
  modified_base (7)..(7): methylated C nucleotide
  modified_base (20)..(20): methylated C nucleotide
  modified_base (32)..(32): methylated C nucleotide
  modified_base (35)..(35): methylated C nucleotide
tcttcgcgcaggcctgggtcgtccctcctagcgccgggaa

SEQ ID NO: 672 - DNA, 42 bp, Artificial Sequence
  Synthetic
  modified_base (6)..(6): methylated C nucleotide
  modified_base (8)..(8): methylated C nucleotide
  modified_base (21)..(21): methylated C nucleotide
  modified_base (33)..(33): methylated C nucleotide
  modified_base (36)..(36): methylated C nucleotide
ctcttcgcgcaggcctgggtcgtccctcctagcgccgggaag

SEQ ID NO: 673 - DNA, 44 bp, Artificial Sequence
  Synthetic
  modified_base (7)..(7): methylated C nucleotide
  modified_base (9)..(9): methylated C nucleotide
  modified_base (22)..(22): methylated C nucleotide
  modified_base (34)..(34): methylated C nucleotide
  modified_base (37)..(37): methylated C nucleotide
tctcttcgcgcaggcctgggtcgtccctcctagcgccgggaagc

SEQ ID NO: 674 - DNA, 34 bp, Artificial Sequence
  Synthetic
  modified_base (5)..(5): methylated C nucleotide
  modified_base (7)..(7): methylated C nucleotide
  modified_base (20)..(20): methylated C nucleotide
  modified_base (32)..(32): methylated C nucleotide
tcttcgcgcaggcctgggtcgtccctcctagcgc

SEQ ID NO: 675 - DNA, 34 bp, Artificial Sequence
  Synthetic
  modified_base (8)..(8): methylated C nucleotide
  modified_base (10)..(10): methylated C nucleotide
  modified_base (23)..(23): methylated C nucleotide
ctctcttcgcgcaggcctgggtcgtccctcctag

SEQ ID NO: 676 - DNA, 34 bp, Artificial Sequence
  Synthetic
  modified_base (11)..(11): methylated C nucleotide
  modified_base (13)..(13): methylated C nucleotide
  modified_base (26)..(26): methylated C nucleotide
tccctctcttcgcgcaggcctgggtcgtccctcc

SEQ ID NO: 677 - DNA, 34 bp, Artificial Sequence
  Synthetic
  modified_base (14)..(14): methylated C nucleotide
  modified_base (16)..(16): methylated C nucleotide
  modified_base (29)..(29): methylated C nucleotide
ttctccctctcttcgcgcaggcctgggtcgtccc

SEQ ID NO: 678 - DNA, 34 bp, Artificial Sequence
  Synthetic
  modified_base (17)..(17): methylated C nucleotide
  modified_base (19)..(19): methylated C nucleotide
  modified_base (32)..(32): methylated C nucleotide
actttctccctctcttcgcgcaggcctgggtcgt

SEQ ID NO: 679 - DNA, 34 bp, Artificial Sequence
  Synthetic
  modified_base (1)..(1): methylated C nucleotide
  modified_base (14)..(14): methylated C nucleotide
  modified_base (26)..(26): methylated C nucleotide
  modified_base (29)..(29): methylated C nucleotide
cgcaggcctgggtcgtccctcctagcgccgggaa

SEQ ID NO: 680 - DNA, 34 bp, Artificial Sequence
  Synthetic
  modified_base (11)..(11): methylated C nucleotide
  modified_base (23)..(23): methylated C nucleotide
  modified_base (26)..(26): methylated C nucleotide
aggcctgggtcgtccctcctagcgccgggaagct

SEQ ID NO: 681 - DNA, 34 bp, Artificial Sequence
  Synthetic
  modified_base (8)..(8): methylated C nucleotide
  modified_base (20)..(20): methylated C nucleotide
  modified_base (23)..(23): methylated C nucleotide
cctgggtcgtccctcctagcgccgggaagctggg

SEQ ID NO: 682 - DNA, 34 bp, Artificial Sequence
  Synthetic
  modified_base (5)..(5): methylated C nucleotide
  modified_base (17)..(17): methylated C nucleotide
  modified_base (20)..(20): methylated C nucleotide
gggtcgtccctcctagcgccgggaagctgggttg

SEQ ID NO: 683 - DNA, 34 bp, Artificial Sequence
  Synthetic
  modified_base (2)..(2): methylated C nucleotide
  modified_base (14)..(14): methylated C nucleotide
  modified_base (17)..(17): methylated C nucleotide
tcgtccctcctagcgccgggaagctgggttgcct

SEQ ID NO: 684 - DNA, 32 bp, Artificial Sequence
  Synthetic
  modified_base (2)..(2): methylated C nucleotide
  modified_base (15)..(15): methylated C nucleotide
  modified_base (27)..(27): methylated C nucleotide
  modified_base (30)..(30): methylated C nucleotide
gcgcaggcctgggtcgtccctcctagcgccgg

SEQ ID NO: 685 - DNA, 30 bp, Artificial Sequence
  Synthetic
  modified_base (13)..(13): methylated C nucleotide
  modified_base (25)..(25): methylated C nucleotide
  modified_base (28)..(28): methylated C nucleotide
gcaggcctgggtcgtccctcctagcgccgg

SEQ ID NO: 686 - DNA, 28 bp, Artificial Sequence
  Synthetic
  modified_base (11)..(11): methylated C nucleotide
  modified_base (23)..(23): methylated C nucleotide
  modified_base (26)..(26): methylated C nucleotide
aggcctgggtcgtccctcctagcgccgg

SEQ ID NO: 687 - DNA, 26 bp, Artificial Sequence
  Synthetic
  modified_base (9)..(9): methylated C nucleotide
  modified_base (21)..(21): methylated C nucleotide
  modified_base (24)..(24): methylated C nucleotide
gcctgggtcgtccctcctagcgccgg

SEQ ID NO: 688 - DNA, 24 bp, Artificial Sequence
  Synthetic
  modified_base (7)..(7): methylated C nucleotide
  modified_base (19)..(19): methylated C nucleotide
  modified_base (22)..(22): methylated C nucleotide
ctgggtcgtccctcctagcgccgg

SEQ ID NO: 689 - DNA, 22 bp, Artificial Sequence
  Synthetic
  modified_base (5)..(5): methylated C nucleotide
  modified_base (17)..(17): methylated C nucleotide
  modified_base (20)..(20): methylated C nucleotide
gggtcgtccctcctagcgccgg

SEQ ID NO: 690 - DNA, 20 bp, Artificial Sequence
  Synthetic
  modified_base (3)..(3): methylated C nucleotide
  modified_base (15)..(15): methylated C nucleotide
  modified_base (18)..(18): methylated C nucleotide
gtcgtccctcctagcgccgg

SEQ ID NO: 691 - DNA, 18 bp, Artificial Sequence
  Synthetic
  modified_base (1)..(1): methylated C nucleotide
  modified_base (13)..(13): methylated C nucleotide
  modified_base (16)..(16): methylated C nucleotide
cgtccctcctagcgccgg

SEQ ID NO: 692 - DNA, 16 bp, Artificial Sequence
  Synthetic
  modified_base (11)..(11): methylated C nucleotide
  modified_base (14)..(14): methylated C nucleotide
tccctcctagcgccgg

SEQ ID NO: 693 - DNA, 15 bp, Artificial Sequence
  Synthetic
  modified_base (10)..(10): methylated C nucleotide
  modified_base (13)..(13): methylated C nucleotide
ccctcctagcgccgg

SEQ ID NO: 694 - DNA, 32 bp, Artificial Sequence
  Synthetic
  modified_base (2)..(2): methylated C nucleotide
  modified_base (4)..(4): methylated C nucleotide
  modified_base (17)..(17): methylated C nucleotide
  modified_base (29)..(29): methylated C nucleotide
  modified_base (32)..(32): methylated C nucleotide
tcgcgcaggcctgggtcgtccctcctagcgcc

SEQ ID NO: 695 - DNA, 30 bp, Artificial Sequence
  Synthetic
  modified_base (2)..(2): methylated C nucleotide
  modified_base (4)..(4): methylated C nucleotide
  modified_base (17)..(17): methylated C nucleotide
  modified_base (29)..(29): methylated C nucleotide
tcgcgcaggcctgggtcgtccctcctagcg

SEQ ID NO: 696 - DNA, 28 bp, Artificial Sequence
  Synthetic
  modified_base (2)..(2): methylated C nucleotide
  modified_base (4)..(4): methylated C nucleotide
  modified_base (17)..(17): methylated C nucleotide
tcgcgcaggcctgggtcgtccctcctag

SEQ ID NO: 697 - DNA, 26 bp, Artificial Sequence
  Synthetic
  modified_base (2)..(2): methylated C nucleotide
  modified_base (4)..(4): methylated C nucleotide
  modified_base (17)..(17): methylated C nucleotide
tcgcgcaggcctgggtcgtccctcct

SEQ ID NO: 698 - DNA, 24 bp, Artificial Sequence
  Synthetic
  modified_base (2)..(2): methylated C nucleotide
  modified_base (4)..(4): methylated C nucleotide
  modified_base (17)..(17): methylated C nucleotide
tcgcgcaggcctgggtcgtccctc

SEQ ID NO: 699 - DNA, 22 bp, Artificial Sequence
  Synthetic
  modified_base (2)..(2): methylated C nucleotide
  modified_base (4)..(4): methylated C nucleotide
  modified_base (17)..(17): methylated C nucleotide
tcgcgcaggcctgggtcgtccc

SEQ ID NO: 700 - DNA, 20 bp, Artificial Sequence
  Synthetic
  modified_base (2)..(2): methylated C nucleotide
  modified_base (4)..(4): methylated C nucleotide
  modified_base (17)..(17): methylated C nucleotide
tcgcgcaggcctgggtcgtc

SEQ ID NO: 701 - DNA, 18 bp, Artificial Sequence
  Synthetic
  modified_base (2)..(2): methylated C nucleotide
  modified_base (4)..(4): methylated C nucleotide
  modified_base (17)..(17): methylated C nucleotide
tcgcgcaggcctgggtcg

SEQ ID NO: 702 - DNA, 16 bp, Artificial Sequence
  Synthetic
  modified_base (2)..(2): methylated C nucleotide
  modified_base (4)..(4): methylated C nucleotide
tcgcgcaggcctgggt

SEQ ID NO: 703 - DNA, 15 bp, Artificial Sequence
  Synthetic
  modified_base (2)..(2): methylated C nucleotide
  modified_base (4)..(4): methylated C nucleotide
tcgcgcaggcctggg

SEQ ID NO: 704 - DNA, 34 bp, Artificial Sequence
  Synthetic
  modified_base (2)..(2): methylated C nucleotide
  modified_base (4)..(4): methylated C nucleotide
  modified_base (17)..(17): methylated C nucleotide
  modified_base (29)..(29): methylated C nucleotide
  modified_base (32)..(32): methylated C nucleotide
tcgcacaggcctgggtcgtccctcctagcgccgg

SEQ ID NO: 705 - DNA, 34 bp, Artificial Sequence
  Synthetic
  modified_base (2)..(2): methylated C nucleotide
  modified_base (4)..(4): methylated C nucleotide
  modified_base (17)..(17): methylated C nucleotide
  modified_base (29)..(29): methylated C nucleotide
  modified_base (32)..(32): methylated C nucleotide
tcgcgcaggcctgggtcgttcctcctagcgccgg

SEQ ID NO: 706 - DNA, 34 bp, Artificial Sequence
  Synthetic
  modified_base (2)..(2): methylated C nucleotide
  modified_base (4)..(4): methylated C nucleotide
  modified_base (17)..(17): methylated C nucleotide
  modified_base (29)..(29): methylated C nucleotide
  modified_base (32)..(32): methylated C nucleotide
tcgcgcaggcctgggtcgtccctccgagcgccgg

SEQ ID NO: 707 - DNA, 23 bp, Artificial Sequence
  Synthetic
  modified_base (3)..(3): methylated C nucleotide
  modified_base (8)..(8): methylated C nucleotide
  modified_base (14)..(14): methylated C nucleotide
  modified_base (19)..(19): methylated C nucleotide
  modified_base (21)..(21): methylated C nucleotide
cccggagcgggaccggaccgcgg

SEQ ID NO: 708 - DNA, 24 bp, Artificial Sequence
  Synthetic
  modified_base (4)..(4): methylated C nucleotide
  modified_base (9)..(9): methylated C nucleotide
  modified_base (15)..(15): methylated C nucleotide
  modified_base (20)..(20): methylated C nucleotide
  modified_base (22)..(22): methylated C nucleotide
acccggagcgggaccggaccgcgg

SEQ ID NO: 709 - DNA, 25 bp, Artificial Sequence
  Synthetic
  modified_base (5)..(5): methylated C nucleotide
  modified_base (10)..(10): methylated C nucleotide
  modified_base (16)..(16): methylated C nucleotide
  modified_base (21)..(21): methylated C nucleotide
  modified_base (23)..(23): methylated C nucleotide
gacccggagcgggaccggaccgcgg

SEQ ID NO: 710 - DNA, 26 bp, Artificial Sequence
  Synthetic
  modified_base (6)..(6): methylated C nucleotide
  modified_base (11)..(11): methylated C nucleotide
  modified_base (17)..(17): methylated C nucleotide
  modified_base (22)..(22): methylated C nucleotide
  modified_base (24)..(24): methylated C nucleotide
tgacccggagcgggaccggaccgcgg

SEQ ID NO: 711 - DNA, 27 bp, Artificial Sequence
  Synthetic
  modified_base (7)..(7): methylated C nucleotide
  modified_base (12)..(12): methylated C nucleotide
  modified_base (18)..(18): methylated C nucleotide
  modified_base (23)..(23): methylated C nucleotide
  modified_base (25)..(25): methylated C nucleotide
ctgacccggagcgggaccggaccgcgg

SEQ ID NO: 712 - DNA, 28 bp, Artificial Sequence
  Synthetic
  modified_base (8)..(8): methylated C nucleotide
  modified_base (13)..(13): methylated C nucleotide
  modified_base (19)..(19): methylated C nucleotide
  modified_base (24)..(24): methylated C nucleotide
  modified_base (26)..(26): methylated C nucleotide
tctgacccggagcgggaccggaccgcgg

SEQ ID NO: 713 - DNA, 24 bp, Artificial Sequence
  Synthetic
  modified_base (3)..(3): methylated C nucleotide
  modified_base (8)..(8): methylated C nucleotide
  modified_base (14)..(14): methylated C nucleotide
  modified_base (19)..(19): methylated C nucleotide
  modified_base (21)..(21): methylated C nucleotide
cccggagcgggaccggaccgcggc

SEQ ID NO: 714 - DNA, 25 bp, Artificial Sequence
  Synthetic
  modified_base (3)..(3): methylated C nucleotide
  modified_base (8)..(8): methylated C nucleotide
  modified_base (14)..(14): methylated C nucleotide
  modified_base (19)..(19): methylated C nucleotide
  modified_base (21)..(21): methylated C nucleotide
cccggagcgggaccggaccgcggcg

SEQ ID NO: 715 - DNA, 26 bp, Artificial Sequence
  Synthetic
  modified_base (3)..(3): methylated C nucleotide
  modified_base (8)..(8): methylated C nucleotide
  modified_base (14)..(14): methylated C nucleotide
  modified_base (19)..(19): methylated C nucleotide
  modified_base (21)..(21): methylated C nucleotide
cccggagcgggaccggaccgcggcgg

SEQ ID NO: 716 - DNA, 27 bp, Artificial Sequence
  Synthetic
  modified_base (3)..(3): methylated C nucleotide
  modified_base (8)..(8): methylated C nucleotide
  modified_base (14)..(14): methylated C nucleotide
  modified_base (19)..(19): methylated C nucleotide
  modified_base (21)..(21): methylated C nucleotide
cccggagcgggaccggaccgcggcggg

SEQ ID NO: 717 - DNA, 28 bp, Artificial Sequence
  Synthetic
  modified_base (3)..(3): methylated C nucleotide
  modified_base (8)..(8): methylated C nucleotide
  modified_base (14)..(14): methylated C nucleotide
  modified_base (19)..(19): methylated C nucleotide
  modified_base (21)..(21): methylated C nucleotide
cccggagcgggaccggaccgcggcgggc

SEQ ID NO: 718 - DNA, 25 bp, Artificial Sequence
  Synthetic
  modified_base (4)..(4): methylated C nucleotide
  modified_base (9)..(9): methylated C nucleotide
  modified_base (15)..(15): methylated C nucleotide
  modified_base (20)..(20): methylated C nucleotide
  modified_base (22)..(22): methylated C nucleotide
acccggagcgggaccggaccgcggc

SEQ ID NO: 719 - DNA, 27 bp, Artificial Sequence
  Synthetic
  modified_base (5)..(5): methylated C nucleotide
  modified_base (10)..(10): methylated C nucleotide
  modified_base (16)..(16): methylated C nucleotide
  modified_base (21)..(21): methylated C nucleotide
  modified_base (23)..(23): methylated C nucleotide
gacccggagcgggaccggaccgcggcg

SEQ ID NO: 720 - DNA, 29 bp, Artificial Sequence
  Synthetic
  modified_base (6)..(6): methylated C nucleotide
  modified_base (11)..(11): methylated C nucleotide
  modified_base (17)..(17): methylated C nucleotide
  modified_base (22)..(22): methylated C nucleotide
  modified_base (24)..(24): methylated C nucleotide
tgacccggagcgggaccggaccgcggcgg

SEQ ID NO: 721 - DNA, 31 bp, Artificial Sequence
  Synthetic
  modified_base (7)..(7): methylated C nucleotide
  modified_base (12)..(12): methylated C nucleotide
  modified_base (18)..(18): methylated C nucleotide
  modified_base (23)..(23): methylated C nucleotide
  modified_base (25)..(25): methylated C nucleotide
ctgacccggagcgggaccggaccgcggcggg

SEQ ID NO: 722 - DNA, 33 bp, Artificial Sequence
  Synthetic
  modified_base (8)..(8): methylated C nucleotide
  modified_base (13)..(13): methylated C nucleotide
  modified_base (19)..(19): methylated C nucleotide
  modified_base (24)..(24)
  modified_base (26)..(26)
tctgacccggagcgggaccggaccgcggcgggc

SEQ ID NO: 723 - DNA, 23 bp, Artificial Sequence
  Synthetic
  modified_base (6)..(6): methylated C nucleotide
  modified_base (11)..(11): methylated C nucleotide
  modified_base (17)..(17): methylated C nucleotide
  modified_base (22)..(22): methylated C nucleotide
tgacccggagcgggaccggaccg

SEQ ID NO: 724 - DNA, 23 bp, Artificial Sequence
  Synthetic
  modified_base (9)..(9): methylated C nucleotide
  modified_base (14)..(14): methylated C nucleotide
  modified_base (20)..(20): methylated C nucleotide
ttctgacccggagcgggaccgga

SEQ ID NO: 725 - DNA, 23 bp, Artificial Sequence
  Synthetic
  modified_base (12)..(12): methylated C nucleotide
  modified_base (17)..(17): methylated C nucleotide
  modified_base (23)..(23): methylated C nucleotide
caattctgacccggagcgggacc

SEQ ID NO: 726 - DNA, 23 bp, Artificial Sequence
  Synthetic
  modified_base (15)..(15): methylated C nucleotide
  modified_base (20)..(20): methylated C nucleotide
cgccaattctgacccggagcggg

SEQ ID NO: 727 - DNA, 23 bp, Artificial Sequence
  Synthetic
  modified_base (18)..(18): methylated C nucleotide
  modified_base (23)..(23): methylated C nucleotide
agccgccaattctgacccggagc

SEQ ID NO: 728 - DNA, 23 bp, Artificial Sequence
  Synthetic
  modified_base (5)..(5): methylated C nucleotide
  modified_base (11)..(11): methylated C nucleotide
  modified_base (16)..(16): methylated C nucleotide
  modified_base (18)..(18): methylated C nucleotide
ggagcgggaccggaccgcggcgg

SEQ ID NO: 729 - DNA, 23 bp, Artificial Sequence
  Synthetic
  modified_base (2)..(2): methylated C nucleotide
  modified_base (8)..(8): methylated C nucleotide
  modified_base (13)..(13): methylated C nucleotide
  modified_base (15)..(15): methylated C nucleotide
gcgggaccggaccgcggcgggct

SEQ ID NO: 730 - DNA, 23 bp, Artificial Sequence
  Synthetic
  modified_base (5)..(5): methylated C nucleotide
  modified_base (10)..(10): methylated C nucleotide
  modified_base (12)..(12): methylated C nucleotide
ggaccggaccgcggcgggctgtg

SEQ ID NO: 731 - DNA, 23 bp, Artificial Sequence
  Synthetic
  modified_base (2)..(2): methylated C nucleotide
  modified_base (7)..(7): methylated C nucleotide
  modified_base (9)..(9): methylated C nucleotide
ccggaccgcggcgggctgtgcgg

SEQ ID NO: 732 - DNA, 23 bp, Artificial Sequence
  Synthetic
  modified_base (4)..(4): methylated C nucleotide
  modified_base (6)..(6): methylated C nucleotide
gaccgcggcgggctgtgcggatg

SEQ ID NO: 733 - DNA, 21 bp, Artificial Sequence
  Synthetic
  modified_base (1)..(1): methylated C nucleotide
  modified_base (6)..(6): methylated C nucleotide
  modified_base (12)..(12): methylated C nucleotide
  modified_base (17)..(17): methylated C nucleotide
  modified_base (19)..(19): methylated C nucleotide
cggagcgggaccggaccgcgg

SEQ ID NO: 734 - DNA, 19 bp, Artificial Sequence
  Synthetic
  modified_base (4)..(4): methylated C nucleotide
  modified_base (10)..(10): methylated C nucleotide
  modified_base (15)..(15): methylated C nucleotide
  modified_base (17)..(17): methylated C nucleotide
gagcgggaccggaccgcgg

SEQ ID NO: 735 - DNA, 17 bp, Artificial Sequence
  Synthetic
  modified_base (2)..(2): methylated C nucleotide
  modified_base (8)..(8): methylated C nucleotide
  modified_base (13)..(13): methylated C nucleotide
  modified_base (15)..(15): methylated C nucleotide
gcgggaccggaccgcgg

SEQ ID NO: 736 - DNA, 15 bp, Artificial Sequence
  Synthetic
  modified_base (6)..(6): methylated C nucleotide
  modified_base (11)..(11): methylated C nucleotide
  modified_base (13)..(13): methylated C nucleotide
gggaccggaccgcgg

SEQ ID NO: 737 - DNA, 21 bp, Artificial Sequence
  Synthetic
  modified_base (3)..(3): methylated C nucleotide
  modified_base (8)..(8): methylated C nucleotide
  modified_base (14)..(14): methylated C nucleotide
  modified_base (19)..(19): methylated C nucleotide
  modified_base (21)..(21): methylated C nucleotide
cccggagcgggaccggaccgc

SEQ ID NO: 738 - DNA, 19 bp, Artificial Sequence
  Synthetic
  modified_base (3)..(3): methylated C nucleotide
  modified_base (8)..(8): methylated C nucleotide
  modified_base (14)..(14): methylated C nucleotide
  modified_base (19)..(19): methylated C nucleotide
cccggagcgggaccggacc

SEQ ID NO: 739 - DNA, 17 bp, Artificial Sequence
  Synthetic
  modified_base (3)..(3): methylated C nucleotide
  modified_base (8)..(8): methylated C nucleotide
  modified_base (14)..(14): methylated C nucleotide
cccggagcgggaccgga

SEQ ID NO: 740 - DNA, 15 bp, Artificial Sequence
  Synthetic
  modified_base (3)..(3): methylated C nucleotide
  modified_base (8)..(8): methylated C nucleotide
  modified_base (14)..(14): methylated C nucleotide
cccggagcgggaccg

SEQ ID NO: 741 - DNA, 23 bp, Artificial Sequence
  Synthetic
  modified_base (3)..(3): methylated C nucleotide
  modified_base (8)..(8): methylated C nucleotide
  modified_base (14)..(14): methylated C nucleotide
  modified_base (19)..(19): methylated C nucleotide
  modified_base (21)..(21): methylated C nucleotide
cccggagccggaccggaccgcgg

SEQ ID NO: 742 - DNA, 23 bp, Artificial Sequence
  Synthetic
  modified_base (3)..(3): methylated C nucleotide
  modified_base (8)..(8): methylated C nucleotide
  modified_base (14)..(14): methylated C nucleotide
  modified_base (19)..(19): methylated C nucleotide
  modified_base (21)..(21): methylated C nucleotide
cccggagcgggaccggaccacgg

SEQ ID NO: 743 - DNA, 23 bp, Artificial Sequence
  Synthetic
  modified_base (3)..(3): methylated C nucleotide
  modified_base (8)..(8): methylated C nucleotide
  modified_base (14)..(14): methylated C nucleotide
  modified_base (19)..(19): methylated C nucleotide
  modified_base (21)..(21): methylated C nucleotide
ccctgagcgggaccggaccgcgg

SEQ ID NO: 744 - DNA, 24 bp, Artificial Sequence
  Synthetic
  modified_base (3)..(3): methylated C nucleotide
  modified_base (11)..(11): methylated C nucleotide
  modified_base (13)..(13): methylated C nucleotide
  modified_base (16)..(16): methylated C nucleotide
  modified_base (21)..(21): methylated C nucleotide
gccggacccacgcggcggcccgcc

SEQ ID NO: 745 - DNA, 25 bp, Artificial Sequence
  Synthetic
  modified_base (4)..(4): methylated C nucleotide
  modified_base (12)..(12): methylated C nucleotide
  modified_base (14)..(14): methylated C nucleotide
  modified_base (17)..(17): methylated C nucleotide
  modified_base (22)..(22): methylated C nucleotide
tgccggacccacgcggcggcccgcc

SEQ ID NO: 746 - DNA, 26 bp, Artificial Sequence
  Synthetic
  modified_base (5)..(5): methylated C nucleotide
  modified_base (13)..(13): methylated C nucleotide
  modified_base (15)..(15): methylated C nucleotide
  modified_base (18)..(18): methylated C nucleotide
  modified_base (23)..(23): methylated C nucleotide
ctgccggacccacgcggcggcccgcc

SEQ ID NO: 747 - DNA, 27 bp, Artificial Sequence
  Synthetic
  modified_base (6)..(6): methylated C nucleotide
  modified_base (14)..(14): methylated C nucleotide
  modified_base (16)..(16): methylated C nucleotide
  modified_base (19)..(19): methylated C nucleotide
  modified_base (24)..(24): methylated C nucleotide
actgccggacccacgcggcggcccgcc

SEQ ID NO: 748 - DNA, 28 bp, Artificial Sequence
  Synthetic
  modified_base (7)..(7): methylated C nucleotide
  modified_base (15)..(15): methylated C nucleotide
  modified_base (17)..(17): methylated C nucleotide
  modified_base (20)..(20): methylated C nucleotide
  modified_base (25)..(25): methylated C nucleotide
gactgccggacccacgcggcggcccgcc

SEQ ID NO: 749 - DNA, 29 bp, Artificial Sequence
  Synthetic
  modified_base (8)..(8): methylated C nucleotide
  modified_base (16)..(16): methylated C nucleotide
  modified_base (18)..(18): methylated C nucleotide
  modified_base (21)..(21): methylated C nucleotide
  modified_base (26)..(26): methylated C nucleotide
ggactgccggacccacgcggcggcccgcc

SEQ ID NO: 750 - DNA, 25 bp, Artificial Sequence
  Synthetic
  modified_base (3)..(3): methylated C nucleotide
  modified_base (11)..(11): methylated C nucleotide
  modified_base (13)..(13): methylated C nucleotide
  modified_base (16)..(16): methylated C nucleotide
  modified_base (21)..(21): methylated C nucleotide
gccggacccacgcggcggcccgccc

SEQ ID NO: 751 - DNA, 26 bp, Artificial Sequence
  Synthetic
  modified_base (3)..(3): methylated C nucleotide
  modified_base (11)..(11): methylated C nucleotide
  modified_base (13)..(13): methylated C nucleotide
  modified_base (16)..(16): methylated C nucleotide
  modified_base (21)..(21): methylated C nucleotide
gccggacccacgcggcggcccgcccc

SEQ ID NO: 752 - DNA, 27 bp, Artificial Sequence
  Synthetic
  modified_base (3)..(3): methylated C nucleotide
  modified_base (11)..(11): methylated C nucleotide
  modified_base (13)..(13): methylated C nucleotide
  modified_base (16)..(16): methylated C nucleotide
  modified_base (21)..(21): methylated C nucleotide
gccggacccacgcggcggcccgccccc

SEQ ID NO: 753 - DNA, 28 bp, Artificial Sequence
  Synthetic
  modified_base (3)..(3): methylated C nucleotide
  modified_base (11)..(11): methylated C nucleotide
  modified_base (13)..(13): methylated C nucleotide
  modified_base (16)..(16): methylated C nucleotide
  modified_base (21)..(21): methylated C nucleotide
gccggacccacgcggcggcccgccccct

SEQ ID NO: 754 - DNA, 29 bp, Artificial Sequence
  Synthetic
  modified_base (3)..(3): methylated C nucleotide
  modified_base (11)..(11): methylated C nucleotide
  modified_base (13)..(13): methylated C nucleotide
  modified_base (16)..(16): methylated C nucleotide
  modified_base (21)..(21): methylated C nucleotide
gccggacccacgcggcggcccgccccctg

SEQ ID NO: 755 - DNA, 26 bp, Artificial Sequence
  Synthetic
  modified_base (4)..(4): methylated C nucleotide
  modified_base (12)..(12): methylated C nucleotide
  modified_base (14)..(14): methylated C nucleotide
  modified_base (17)..(17): methylated C nucleotide
  modified_base (22)..(22): methylated C nucleotide
tgccggacccacgcggcggcccgccc

SEQ ID NO: 756 - DNA, 28 bp, Artificial Sequence
  Synthetic
  modified_base (5)..(5): methylated C nucleotide
  modified_base (13)..(13): methylated C nucleotide
  modified_base (15)..(15): methylated C nucleotide
  modified_base (18)..(18): methylated C nucleotide
  modified_base (23)..(23): methylated C nucleotide
ctgccggacccacgcggcggcccgcccc

SEQ ID NO: 757 - DNA, 30 bp, Artificial Sequence
  Synthetic
  modified_base (6)..(6): methylated C nucleotide
  modified_base (14)..(14): methylated C nucleotide
  modified_base (16)..(16): methylated C nucleotide
  modified_base (19)..(19): methylated C nucleotide
  modified_base (24)..(24): methylated C nucleotide
actgccggacccacgcggcggcccgccccc

SEQ ID NO: 758 - DNA, 32 bp, Artificial Sequence
  Synthetic
  modified_base (7)..(7): methylated C nucleotide
  modified_base (15)..(15): methylated C nucleotide
  modified_base (17)..(17): methylated C nucleotide
  modified_base (20)..(20): methylated C nucleotide
  modified_base (25)..(25): methylated C nucleotide
gactgccggacccacgcggcggcccgccccct

SEQ ID NO: 759 - DNA, 34 bp, Artificial Sequence
  Synthetic
  modified_base (8)..(8): methylated C nucleotide
  modified_base (16)..(16): methylated C nucleotide
  modified_base (18)..(18): methylated C nucleotide
  modified_base (21)..(21): methylated C nucleotide
  modified_base (26)..(26): methylated C nucleotide
ggactgccggacccacgcggcggcccgccccctg

SEQ ID NO: 760 - DNA, 24 bp, Artificial Sequence
  Synthetic
  modified_base (6)..(6): methylated C nucleotide
  modified_base (14)..(14): methylated C nucleotide
  modified_base (16)..(16): methylated C nucleotide
  modified_base (19)..(19): methylated C nucleotide
  modified_base (24)..(24): methylated C nucleotide
actgccggacccacgcggcggccc

SEQ ID NO: 761 - DNA, 24 bp, Artificial Sequence
  Synthetic
  modified_base (9)..(9): methylated C nucleotide
  modified_base (17)..(17): methylated C nucleotide
  modified_base (19)..(19): methylated C nucleotide
  modified_base (22)..(22): methylated C nucleotide
gggactgccggacccacgcggcgg

SEQ ID NO: 762 - DNA, 24 bp, Artificial Sequence
  Synthetic
  modified_base (12)..(12): methylated C nucleotide
  modified_base (20)..(20): methylated C nucleotide
  modified_base (22)..(22): methylated C nucleotide
ggagggactgccggacccacgcgg

SEQ ID NO: 763 - DNA, 24 bp, Artificial Sequence
  Synthetic
  modified_base (15)..(15): methylated C nucleotide
  modified_base (23)..(23): methylated C nucleotide
ggaggagggactgccggacccacg

SEQ ID NO: 764 - DNA, 24 bp, Artificial Sequence
  Synthetic
  modified_base (18)..(18): methylated C nucleotide
gcgggaggagggactgccggaccc

SEQ ID NO: 765 - DNA, 24 bp, Artificial Sequence
  Synthetic
  modified_base (8)..(8): methylated C nucleotide
  modified_base (10)..(10): methylated C nucleotide
  modified_base (13)..(13): methylated C nucleotide
  modified_base (18)..(18): methylated C nucleotide
ggacccacgcggcggcccgccccc

SEQ ID NO: 766 - DNA, 24 bp, Artificial Sequence
  Synthetic
  modified_base (5)..(5): methylated C nucleotide
  modified_base (7)..(7): methylated C nucleotide
  modified_base (10)..(10): methylated C nucleotide
  modified_base (15)..(15): methylated C nucleotide
cccacgcggcggcccgccccctgc

SEQ ID NO: 767 - DNA, 24 bp, Artificial Sequence
  Synthetic
  modified_base (2)..(2): methylated C nucleotide
  modified_base (4)..(4): methylated C nucleotide
  modified_base (7)..(7): methylated C nucleotide
  modified_base (12)..(12): methylated C nucleotide
acgcggcggcccgccccctgccta

SEQ ID NO: 768 - DNA, 24 bp, Artificial Sequence
  Synthetic
  modified_base (1)..(1): methylated C nucleotide
  modified_base (4)..(4): methylated C nucleotide
  modified_base (9)..(9): methylated C nucleotide
cggcggcccgccccctgcctagcc

SEQ ID NO: 769 - DNA, 24 bp, Artificial Sequence
  Synthetic
  modified_base (1)..(1): methylated C nucleotide
  modified_base (6)..(6): methylated C nucleotide
cggcccgccccctgcctagccgca

SEQ ID NO: 770 - DNA, 22 bp, Artificial Sequence
  Synthetic
  modified_base (1)..(1): methylated C nucleotide
  modified_base (9)..(9): methylated C nucleotide
  modified_base (11)..(11): methylated C nucleotide
  modified_base (14)..(14): methylated C nucleotide
  modified_base (19)..(19): methylated C nucleotide
cggacccacgcggcggcccgcc

SEQ ID NO: 771 - DNA, 20 bp, Artificial Sequence
  Synthetic
  modified_base (7)..(7): methylated C nucleotide
  modified_base (9)..(9): methylated C nucleotide
  modified_base (12)..(12): methylated C nucleotide
  modified_base (17)..(17): methylated C nucleotide
gacccacgcggcggcccgcc

SEQ ID NO: 772 - DNA, 18 bp, Artificial Sequence
  Synthetic
  modified_base (5)..(5): methylated C nucleotide
  modified_base (7)..(7): methylated C nucleotide
  modified_base (10)..(10): methylated C nucleotide
  modified_base (15)..(15): methylated C nucleotide
cccacgcggcggcccgcc

SEQ ID NO: 773 - DNA, 16 bp, Artificial Sequence
  Synthetic
  modified_base (3)..(3): methylated C nucleotide
  modified_base (5)..(5): methylated C nucleotide
  modified_base (8)..(8): methylated C nucleotide
  modified_base (13)..(13): methylated C nucleotide
cacgcggcggcccgcc

SEQ ID NO: 774 - DNA, 15 bp, Artificial Sequence
  Synthetic
  modified_base (2)..(2): methylated C nucleotide
  modified_base (4)..(4): methylated C nucleotide
  modified_base (7)..(7): methylated C nucleotide
  modified_base (12)..(12): methylated C nucleotide
acgcggcggcccgcc

SEQ ID NO: 775 - DNA, 22 bp, Artificial Sequence
  Synthetic
  modified_base (3)..(3): methylated C nucleotide
  modified_base (11)..(11): methylated C nucleotide
  modified_base (13)..(13): methylated C nucleotide
  modified_base (16)..(16): methylated C nucleotide
  modified_base (21)..(21): methylated C nucleotide
gccggacccacgcggcggcccg

SEQ ID NO: 776 - DNA, 20 bp, Artificial Sequence
  Synthetic
  modified_base (3)..(3): methylated C nucleotide
  modified_base (11)..(11): methylated C nucleotide
  modified_base (13)..(13): methylated C nucleotide
  modified_base (16)..(16): methylated C nucleotide
gccggacccacgcggcggcc

SEQ ID NO: 777 - DNA, 18 bp, Artificial Sequence
  Synthetic
  modified_base (3)..(3): methylated C nucleotide
  modified_base (11)..(11): methylated C nucleotide
  modified_base (13)..(13): methylated C nucleotide
  modified_base (16)..(16): methylated C nucleotide
gccggacccacgcggcgg

SEQ ID NO: 778 - DNA, 16 bp, Artificial Sequence
  Synthetic
  modified_base (3)..(3): methylated C nucleotide
  modified_base (11)..(11): methylated C nucleotide
  modified_base (13)..(13): methylated C nucleotide
  modified_base (16)..(16): methylated C nucleotide
gccggacccacgcggc

SEQ ID NO: 779 - DNA, 15 bp, Artificial Sequence
  Synthetic
  modified_base (3)..(3): methylated C nucleotide
  modified_base (11)..(11): methylated C nucleotide
  modified_base (13)..(13): methylated C nucleotide
gccggacccacgcgg

SEQ ID NO: 780 - DNA, 24 bp, Artificial Sequence
  Synthetic
  modified_base (3)..(3): methylated C nucleotide
  modified_base (11)..(11): methylated C nucleotide
  modified_base (13)..(13): methylated C nucleotide
  modified_base (16)..(16): methylated C nucleotide
  modified_base (21)..(21): methylated C nucleotide
gccgggcccacgcggcggcccgcc

SEQ ID NO: 781 - DNA, 24 bp, Artificial Sequence
  Synthetic
  modified_base (3)..(3): methylated C nucleotide
  modified_base (11)..(11): methylated C nucleotide
  modified_base (13)..(13): methylated C nucleotide
  modified_base (16)..(16): methylated C nucleotide
  modified_base (21)..(21): methylated C nucleotide
gccggacccacgctgcggcccgcc

SEQ ID NO: 782 - DNA, 24 bp, Artificial Sequence
  Synthetic
  modified_base (3)..(3): methylated C nucleotide
  modified_base (11)..(11): methylated C nucleotide
  modified_base (13)..(13): methylated C nucleotide
  modified_base (16)..(16): methylated C nucleotide
  modified_base (21)..(21): methylated C nucleotide
gccggacccacgcggcggtccgcc

SEQ ID NO: 783 - DNA, 27 bp, Artificial Sequence
  Synthetic
  modified_base (3)..(3)
  modified_base (6)..(6)
  modified_base (9)..(9)
  modified_base (18)..(18)
  modified_base (21)..(21)
  modified_base (24)..(24)
ttcgccgccgccactgccgccgccgct

SEQ ID NO: 784 - DNA, 28 bp, Artificial Sequence
  Synthetic
  modified_base (4)..(4): methylated C nucleotide
  modified_base (7)..(7): methylated C nucleotide
  modified_base (10)..(10): methylated C nucleotide
  modified_base (19)..(19): methylated C nucleotide
  modified_base (22)..(22): methylated C nucleotide
  modified_base (25)..(25): methylated C nucleotide
cttcgccgccgccactgccgccgccgct

SEQ ID NO: 785 - DNA, 29 bp, Artificial Sequence
  Synthetic
  modified_base (5)..(5): methylated C nucleotide
  modified_base (8)..(8): methylated C nucleotide
  modified_base (11)..(11): methylated C nucleotide
  modified_base (20)..(20): methylated C nucleotide
  modified_base (23)..(23): methylated C nucleotide
  modified_base (26)..(26): methylated C nucleotide
ccttcgccgccgccactgccgccgccgct

SEQ ID NO: 786 - DNA, 30 bp, Artificial Sequence
  Synthetic
  modified_base (6)..(6): methylated C nucleotide
  modified_base (9)..(9): methylated C nucleotide
  modified_base (12)..(12): methylated C nucleotide
  modified_base (21)..(21): methylated C nucleotide
  modified_base (24)..(24): methylated C nucleotide
  modified_base (27)..(27): methylated C nucleotide
accttcgccgccgccactgccgccgccgct

SEQ ID NO: 787 - DNA, 31 bp, Artificial Sequence
  Synthetic
  modified_base (7)..(7): methylated C nucleotide
  modified_base (10)..(10): methylated C nucleotide
  modified_base (13)..(13): methylated C nucleotide
  modified_base (22)..(22): methylated C nucleotide
  modified_base (25)..(25): methylated C nucleotide
  modified_base (28)..(28): methylated C nucleotide
caccttcgccgccgccactgccgccgccgct

SEQ ID NO: 788 - DNA, 32 bp, Artificial Sequence
  Synthetic
  modified_base (8)..(8): methylated C nucleotide
  modified_base (11)..(11): methylated C nucleotide
  modified_base (14)..(14): methylated C nucleotide
  modified_base (23)..(23): methylated C nucleotide
  modified_base (26)..(26): methylated C nucleotide
  modified_base (29)..(29): methylated C nucleotide
ccaccttcgccgccgccactgccgccgccgct

SEQ ID NO: 789 - DNA, 28 bp, Artificial Sequence
  Synthetic
  modified_base (3)..(3): methylated C nucleotide
  modified_base (6)..(6): methylated C nucleotide
  modified_base (9)..(9): methylated C nucleotide
  modified_base (18)..(18): methylated C nucleotide
  modified_base (21)..(21): methylated C nucleotide
  modified_base (24)..(24): methylated C nucleotide
ttcgccgccgccactgccgccgccgctg

SEQ ID NO: 790 - DNA, 29 bp, Artificial Sequence
  Synthetic
  modified_base (3)..(3): methylated C nucleotide
  modified_base (6)..(6): methylated C nucleotide
  modified_base (9)..(9): methylated C nucleotide
  modified_base (18)..(18): methylated C nucleotide
  modified_base (21)..(21): methylated C nucleotide
  modified_base (24)..(24): methylated C nucleotide
ttcgccgccgccactgccgccgccgctgc

SEQ ID NO: 791 - DNA, 30 bp, Artificial Sequence
  Synthetic
  modified_base (3)..(3): methylated C nucleotide
  modified_base (6)..(6): methylated C nucleotide
  modified_base (9)..(9): methylated C nucleotide
  modified_base (18)..(18): methylated C nucleotide
  modified_base (21)..(21): methylated C nucleotide
  modified_base (24)..(24): methylated C nucleotide
ttcgccgccgccactgccgccgccgctgct

SEQ ID NO: 792 - DNA, 31 bp, Artificial Sequence
  Synthetic
  modified_base (3)..(3): methylated C nucleotide
  modified_base (6)..(6): methylated C nucleotide
  modified_base (9)..(9): methylated C nucleotide
  modified_base (18)..(18): methylated C nucleotide
  modified_base (21)..(21): methylated C nucleotide
  modified_base (24)..(24): methylated C nucleotide
ttcgccgccgccactgccgccgccgctgctg

SEQ ID NO: 793 - DNA, 32 bp, Artificial Sequence
  Synthetic
  modified_base (3)..(3): methylated C nucleotide
  modified_base (6)..(6): methylated C nucleotide
  modified_base (9)..(9): methylated C nucleotide
  modified_base (18)..(18): methylated C nucleotide
  modified_base (21)..(21): methylated C nucleotide
  modified_base (24)..(24): methylated C nucleotide
ttcgccgccgccactgccgccgccgctgctgc

SEQ ID NO: 794 - DNA, 29 bp, Artificial Sequence
  Synthetic
  modified_base (4)..(4): methylated C nucleotide
  modified_base (7)..(7): methylated C nucleotide
  modified_base (10)..(10): methylated C nucleotide
  modified_base (19)..(19): methylated C nucleotide
  modified_base (22)..(22): methylated C nucleotide
  modified_base (25)..(25): methylated C nucleotide
cttcgccgccgccactgccgccgccgctg

SEQ ID NO: 795 - DNA, 31 bp, Artificial Sequence
  Synthetic
  modified_base (5)..(5): methylated C nucleotide
  modified_base (8)..(8): methylated C nucleotide
  modified_base (11)..(11): methylated C nucleotide
  modified_base (20)..(20): methylated C nucleotide
  modified_base (23)..(23): methylated C nucleotide
  modified_base (26)..(26): methylated C nucleotide
ccttcgccgccgccactgccgccgccgctgc

SEQ ID NO: 796 - DNA, 33 bp, Artificial Sequence
  Synthetic
  modified_base (6)..(6): methylated C nucleotide
  modified_base (9)..(9): methylated C nucleotide
  modified_base (12)..(12): methylated C nucleotide
  modified_base (21)..(21): methylated C nucleotide
  modified_base (24)..(24): methylated C nucleotide
  modified_base (27)..(27): methylated C nucleotide
accttcgccgccgccactgccgccgccgctgct

SEQ ID NO: 797 - DNA, 35 bp, Artificial Sequence
  Synthetic
  modified_base (7)..(7): methylated C nucleotide
  modified_base (10)..(10): methylated C nucleotide
  modified_base (13)..(13): methylated C nucleotide
  modified_base (22)..(22): methylated C nucleotide
  modified_base (25)..(25): methylated C nucleotide
  modified_base (28)..(28): methylated C nucleotide
caccttcgccgccgccactgccgccgccgctgctg

SEQ ID NO: 798 - DNA, 37 bp, Artificial Sequence
  Synthetic
  modified_base (8)..(8): methylated C nucleotide
  modified_base (11)..(11): methylated C nucleotide
  modified_base (14)..(14): methylated C nucleotide
  modified_base (23)..(23): methylated C nucleotide
  modified_base (26)..(26): methylated C nucleotide
  modified_base (29)..(29): methylated C nucleotide
ccaccttcgccgccgccactgccgccgccgctgctgc

SEQ ID NO: 799 - DNA, 27 bp, Artificial Sequence
  Synthetic
  modified_base (6)..(6): methylated C nucleotide
  modified_base (9)..(9): methylated C nucleotide
  modified_base (12)..(12): methylated C nucleotide
  modified_base (21)..(21): methylated C nucleotide
  modified_base (24)..(24): methylated C nucleotide
  modified_base (27)..(27): methylated C nucleotide
accttcgccgccgccactgccgccgcc

SEQ ID NO: 800 - DNA, 27 bp, Artificial Sequence
  Synthetic
  modified_base (9)..(9): methylated C nucleotide
  modified_base (12)..(12): methylated C nucleotide
  modified_base (15)..(15): methylated C nucleotide
  modified_base (24)..(24): methylated C nucleotide
  modified_base (27)..(27): methylated C nucleotide
gccaccttcgccgccgccactgccgcc

SEQ ID NO: 801 - DNA, 27 bp, Artificial Sequence
  Synthetic
  modified_base (12)..(12): methylated C nucleotide
  modified_base (15)..(15): methylated C nucleotide
  modified_base (18)..(18): methylated C nucleotide
  modified_base (27)..(27): methylated C nucleotide
gccgccaccttcgccgccgccactgcc

SEQ ID NO: 802 - DNA, 27 bp, Artificial Sequence
  Synthetic
  modified_base (15)..(15): methylated C nucleotide
  modified_base (18)..(18): methylated C nucleotide
  modified_base (21)..(21): methylated C nucleotide
gccgccgccaccttcgccgccgccact

SEQ ID NO: 803 - DNA, 27 bp, Artificial Sequence
  Synthetic
  modified_base (18)..(18): methylated C nucleotide
  modified_base (21)..(21): methylated C nucleotide
  modified_base (24)..(24): methylated C nucleotide
cgagccgccgccaccttcgccgccgcc

SEQ ID NO: 804 - DNA, 27 bp, Artificial Sequence
  Synthetic
  modified_base (3)..(3): methylated C nucleotide
  modified_base (6)..(6): methylated C nucleotide
  modified_base (15)..(15): methylated C nucleotide
  modified_base (18)..(18): methylated C nucleotide
  modified_base (21)..(21): methylated C nucleotide
gccgccgccactgccgccgccgctgct

SEQ ID NO: 805 - DNA, 27 bp, Artificial Sequence
  Synthetic
  modified_base (3)..(3): methylated C nucleotide
  modified_base (12)..(12): methylated C nucleotide
  modified_base (15)..(15): methylated C nucleotide
  modified_base (18)..(18): methylated C nucleotide
gccgccactgccgccgccgctgctgcc

SEQ ID NO: 806 - DNA, 27 bp, Artificial Sequence
  Synthetic
  modified_base (9)..(9): methylated C nucleotide
  modified_base (12)..(12): methylated C nucleotide
  modified_base (15)..(15): methylated C nucleotide
gccactgccgccgccgctgctgcctcc

SEQ ID NO: 807 - DNA, 27 bp, Artificial Sequence
  Synthetic
  modified_base (6)..(6): methylated C nucleotide
  modified_base (9)..(9): methylated C nucleotide
  modified_base (12)..(12): methylated C nucleotide
actgccgccgccgctgctgcctccgcc

SEQ ID NO: 808 - DNA, 27 bp, Artificial Sequence
  Synthetic
  modified_base (3)..(3): methylated C nucleotide
  modified_base (6)..(6): methylated C nucleotide
  modified_base (9)..(9): methylated C nucleotide
gccgccgccgctgctgcctccgccgcc

SEQ ID NO: 809 - DNA, 25 bp, Artificial Sequence
  Synthetic
  modified_base (1)..(1): methylated C nucleotide
  modified_base (4)..(4): methylated C nucleotide
  modified_base (7)..(7): methylated C nucleotide
  modified_base (16)..(16): methylated C nucleotide
  modified_base (19)..(19): methylated C nucleotide
cgccgccgccactgccgccgccgct

SEQ ID NO: 810 - DNA, 23 bp, Artificial Sequence
  Synthetic
  modified_base (2)..(2): methylated C nucleotide
  modified_base (5)..(5): methylated C nucleotide
  modified_base (14)..(14): methylated C nucleotide
  modified_base (17)..(17): methylated C nucleotide
  modified_base (20)..(20): methylated C nucleotide
ccgccgccactgccgccgccgct

SEQ ID NO: 811 - DNA, 21 bp, Artificial Sequence
  Synthetic
  modified_base (3)..(3)
  modified_base (12)..(12)
  modified_base (15)..(15)
  modified_base (18)..(18)
gccgccactgccgccgccgct

SEQ ID NO: 812 - DNA, 19 bp, Artificial Sequence
  Synthetic
  modified_base (1)..(1): methylated C nucleotide
  modified_base (10)..(10): methylated C nucleotide
  modified_base (13)..(13): methylated C nucleotide
  modified_base (16)..(16): methylated C nucleotide
cgccactgccgccgccgct

SEQ ID NO: 813 - DNA, 17 bp, Artificial Sequence
  Synthetic
  modified_base (8)..(8): methylated C nucleotide
  modified_base (11)..(11): methylated C nucleotide
  modified_base (14)..(14): methylated C nucleotide
ccactgccgccgccgct

SEQ ID NO: 814 - DNA, 15 bp, Artificial Sequence
  Synthetic
  modified_base (6)..(6): methylated C nucleotide
  modified_base (9)..(9): methylated C nucleotide
  modified_base (12)..(12): methylated C nucleotide
actgccgccgccgct

SEQ ID NO: 815 - DNA, 25 bp, Artificial Sequence
  Synthetic
  modified_base (3)..(3): methylated C nucleotide
  modified_base (6)..(6): methylated C nucleotide
  modified_base (9)..(9): methylated C nucleotide
  modified_base (18)..(18): methylated C nucleotide
  modified_base (21)..(21): methylated C nucleotide
  modified_base (24)..(24): methylated C nucleotide
ttcgccgccgccactgccgccgccg

SEQ ID NO: 816 - DNA, 23 bp, Artificial Sequence
  Synthetic
  modified_base (3)..(3): methylated C nucleotide
  modified_base (6)..(6): methylated C nucleotide
  modified_base (9)..(9): methylated C nucleotide
  modified_base (18)..(18): methylated C nucleotide
  modified_base (21)..(21): methylated C nucleotide
ttcgccgccgccactgccgccgc

SEQ ID NO: 817 - DNA, 21 bp, Artificial Sequence
  Synthetic
  modified_base (3)..(3): methylated C nucleotide
  modified_base (6)..(6): methylated C nucleotide
  modified_base (9)..(9): methylated C nucleotide
  modified_base (18)..(18): methylated C nucleotide
  modified_base (21)..(21): methylated C nucleotide
ttcgccgccgccactgccgcc

SEQ ID NO: 818 - DNA, 19 bp, Artificial Sequence
  Synthetic
  modified_base (3)..(3): methylated C nucleotide
  modified_base (6)..(6): methylated C nucleotide
  modified_base (9)..(9): methylated C nucleotide
  modified_base (18)..(18): methylated C nucleotide
ttcgccgccgccactgccg

SEQ ID NO: 819 - DNA, 17 bp, Artificial Sequence
  Synthetic
  modified_base (3)..(3): methylated C nucleotide
  modified_base (6)..(6): methylated C nucleotide
  modified_base (9)..(9): methylated C nucleotide
ttcgccgccgccactgc

SEQ ID NO: 820 - DNA, 15 bp, Artificial Sequence
  Synthetic
  modified_base (3)..(3): methylated C nucleotide
  modified_base (6)..(6): methylated C nucleotide
  modified_base (9)..(9): methylated C nucleotide
ttcgccgccgccact

SEQ ID NO: 821 - DNA, 27 bp, Artificial Sequence
  Synthetic
  modified_base (3)..(3): methylated C nucleotide
  modified_base (6)..(6): methylated C nucleotide
  modified_base (9)..(9): methylated C nucleotide
  modified_base (18)..(18): methylated C nucleotide
  modified_base (21)..(21): methylated C nucleotide
  modified_base (24)..(24): methylated C nucleotide
ttcaccgccgccactgccgccgccgct

SEQ ID NO: 822 - DNA, 27 bp, Artificial Sequence
  Synthetic
  modified_base (3)..(3): methylated C nucleotide
  modified_base (6)..(6): methylated C nucleotide
  modified_base (9)..(9): methylated C nucleotide
  modified_base (18)..(18): methylated C nucleotide
  modified_base (21)..(21): methylated C nucleotide
  modified_base (24)..(24): methylated C nucleotide
ttcgccgccgccactcccgccgccgct

SEQ ID NO: 823 - DNA, 27 bp, Artificial Sequence
  Synthetic
  modified_base (3)..(3): methylated C nucleotide
  modified_base (6)..(6): methylated C nucleotide
  modified_base (9)..(9): methylated C nucleotide
  modified_base (18)..(18): methylated C nucleotide
  modified_base (21)..(21): methylated C nucleotide
  modified_base (24)..(24): methylated C nucleotide
ttcgccgccgtcactgccgccgccgct

SEQ ID NO: 824 - DNA, 28 bp, Artificial Sequence
  Synthetic
gcggccacgccgccccgctgaccggtct

SEQ ID NO: 825 - DNA, 29 bp, Artificial Sequence
  Synthetic
agcggccacgccgccccgctgaccggtct

SEQ ID NO: 826 - DNA, 30 bp, Artificial Sequence
  Synthetic
gagcggccacgccgccccgctgaccggtct

SEQ ID NO: 827 - DNA, 31 bp, Artificial Sequence
  Synthetic
cgagcggccacgccgccccgctgaccggtct

SEQ ID NO: 828 - DNA, 32 bp, Artificial Sequence
  Synthetic
gcgagcggccacgccgccccgctgaccggtct

SEQ ID NO: 829 - DNA, 33 bp, Artificial Sequence
  Synthetic
cgcgagcggccacgccgccccgctgaccggtct

SEQ ID NO: 830 - DNA, 29 bp, Artificial Sequence
  Synthetic
gcggccacgccgccccgctgaccggtctc

SEQ ID NO: 831 - DNA, 30 bp, Artificial Sequence
  Synthetic
gcggccacgccgccccgctgaccggtctcc

SEQ ID NO: 832 - DNA, 31 bp, Artificial Sequence
  Synthetic
gcggccacgccgccccgctgaccggtctcca

SEQ ID NO: 833 - DNA, 32 bp, Artificial Sequence
  Synthetic
gcggccacgccgccccgctgaccggtctccac

SEQ ID NO: 834 - DNA, 33 bp, Artificial Sequence
  Synthetic
gcggccacgccgccccgctgaccggtctccaca

SEQ ID NO: 835 - DNA, 30 bp, Artificial Sequence
  Synthetic
agcggccacgccgccccgctgaccggtctc

SEQ ID NO: 836 - DNA, 32 bp, Artificial Sequence
  Synthetic
gagcggccacgccgccccgctgaccggtctcc

SEQ ID NO: 837 - DNA, 34 bp, Artificial Sequence
  Synthetic
cgagcggccacgccgccccgctgaccggtctcca

SEQ ID NO: 838 - DNA, 36 bp, Artificial Sequence
  Synthetic
gcgagcggccacgccgccccgctgaccggtctccac

SEQ ID NO: 839 - DNA, 38 bp, Artificial Sequence
  Synthetic
cgcgagcggccacgccgccccgctgaccggtctccaca

SEQ ID NO: 840 - DNA, 28 bp, Artificial Sequence
  Synthetic
cgagcggccacgccgccccgctgaccgg

SEQ ID NO: 841 - DNA, 28 bp, Artificial Sequence
  Synthetic
ccgcgagcggccacgccgccccgctgac

SEQ ID NO: 842 - DNA, 28 bp, Artificial Sequence
  Synthetic
acgccgcgagcggccacgccgccccgct

SEQ ID NO: 843 - DNA, 28 bp, Artificial Sequence
  Synthetic
gagacgccgcgagcggccacgccgcccc

SEQ ID NO: 844 - DNA, 28 bp, Artificial Sequence
  Synthetic
agggagacgccgcgagcggccacgccgc

SEQ ID NO: 845 - DNA, 28 bp, Artificial Sequence
  Synthetic
gccacgccgccccgctgaccggtctcca

SEQ ID NO: 846 - DNA, 28 bp, Artificial Sequence
  Synthetic
acgccgccccgctgaccggtctccacag

SEQ ID NO: 847 - DNA, 28 bp, Artificial Sequence
  Synthetic
ccgccccgctgaccggtctccacagaga

SEQ ID NO: 848 - DNA, 28 bp, Artificial Sequence
  Synthetic
ccccgctgaccggtctccacagagaagc

SEQ ID NO: 849 - DNA, 28 bp, Artificial Sequence
  Synthetic
cgctgaccggtctccacagagaagctgc

SEQ ID NO: 850 - DNA, 26 bp, Artificial Sequence
  Synthetic
ggccacgccgccccgctgaccggtct

SEQ ID NO: 851 - DNA, 24 bp, Artificial Sequence
  Synthetic
ccacgccgccccgctgaccggtct

SEQ ID NO: 852 - DNA, 22 bp, Artificial Sequence
  Synthetic
acgccgccccgctgaccggtct

SEQ ID NO: 853 - DNA, 20 bp, Artificial Sequence
  Synthetic
gccgccccgctgaccggtct

SEQ ID NO: 854 - DNA, 18 bp, Artificial Sequence
  Synthetic
cgccccgctgaccggtct

SEQ ID NO: 855 - DNA, 16 bp, Artificial Sequence
  Synthetic
ccccgctgaccggtct

SEQ ID NO: 856 - DNA, 15 bp, Artificial Sequence
  Synthetic
cccgctgaccggtct

SEQ ID NO: 857 - DNA, 26 bp, Artificial Sequence
  Synthetic
gcggccacgccgccccgctgaccggt

SEQ ID NO: 858 - DNA, 24 bp, Artificial Sequence
  Synthetic
gcggccacgccgccccgctgaccg

SEQ ID NO: 859 - DNA, 22 bp, Artificial Sequence
  Synthetic
gcggccacgccgccccgctgac

SEQ ID NO: 860 - DNA, 20 bp, Artificial Sequence
  Synthetic
gcggccacgccgccccgctg

SEQ ID NO: 861 - DNA, 18 bp, Artificial Sequence
  Synthetic
gcggccacgccgccccgc

SEQ ID NO: 862 - DNA, 16 bp, Artificial Sequence
  Synthetic
gcggccacgccgcccc

SEQ ID NO: 863 - DNA, 15 bp, Artificial Sequence
  Synthetic
gcggccacgccgccc

SEQ ID NO: 864 - DNA, 28 bp, Artificial Sequence
  Synthetic
gcggccacgacgccccgctgaccggtct

SEQ ID NO: 865 - DNA, 28 bp, Artificial Sequence
  Synthetic
gcggccacgccgctccgctgaccggtct

SEQ ID NO: 866 - DNA, 28 bp, Artificial Sequence
  Synthetic
gcggccacgccgccccgcggaccggtct

SEQ ID NO: 867 - DNA, 26 bp, Artificial Sequence
  Synthetic
  modified_base (3)..(3): methylated C nucleotide
  modified_base (5)..(5): methylated C nucleotide
  modified_base (7)..(7): methylated C nucleotide
  modified_base (12)..(12): methylated C nucleotide
  modified_base (17)..(17): methylated C nucleotide
  modified_base (19)..(19): methylated C nucleotide
ggcgcgcggttcgccccgcgcatggg

SEQ ID NO: 868 - DNA, 27 bp, Artificial Sequence
  Synthetic
  modified_base (4)..(4): methylated C nucleotide
  modified_base (6)..(6): methylated C nucleotide
  modified_base (8)..(8): methylated C nucleotide
  modified_base (13)..(13): methylated C nucleotide
  modified_base (18)..(18): methylated C nucleotide
  modified_base (20)..(20): methylated C nucleotide
gggcgcgcggttcgccccgcgcatggg

SEQ ID NO: 869 - DNA, 28 bp, Artificial Sequence
  Synthetic
  modified_base (5)..(5): methylated C nucleotide
  modified_base (7)..(7): methylated C nucleotide
  modified_base (9)..(9): methylated C nucleotide
  modified_base (14)..(14): methylated C nucleotide
  modified_base (19)..(19): methylated C nucleotide
  modified_base (21)..(21): methylated C nucleotide
ggggcgcgcggttcgccccgcgcatggg

SEQ ID NO: 870 - DNA, 29 bp, Artificial Sequence
  Synthetic
  modified_base (6)..(6): methylated C nucleotide
  modified_base (8)..(8): methylated C nucleotide
  modified_base (10)..(10): methylated C nucleotide
  modified_base (15)..(15): methylated C nucleotide
  modified_base (20)..(20): methylated C nucleotide
  modified_base (22)..(22): methylated C nucleotide
gggggcgcgcggttcgccccgcgcatggg

SEQ ID NO: 871 - DNA, 30 bp, Artificial Sequence
  Synthetic
  modified_base (7)..(7): methylated C nucleotide
  modified_base (9)..(9): methylated C nucleotide
  modified_base (11)..(11): methylated C nucleotide
  modified_base (16)..(16): methylated C nucleotide
  modified_base (21)..(21): methylated C nucleotide
  modified_base (23)..(23): methylated C nucleotide
cgggggcgcgcggttcgccccgcgcatggg

SEQ ID NO: 872 - DNA, 31 bp, Artificial Sequence
  Synthetic
  modified_base (8)..(8): methylated C nucleotide
  modified_base (10)..(10): methylated C nucleotide
  modified_base (12)..(12): methylated C nucleotide
  modified_base (17)..(17): methylated C nucleotide
  modified_base (22)..(22): methylated C nucleotide
  modified_base (24)..(24): methylated C nucleotide
gcgggggcgcgcggttcgccccgcgcatggg

SEQ ID NO: 873 - DNA, 27 bp, Artificial Sequence
  Synthetic
  modified_base (3)..(3): methylated C nucleotide
  modified_base (5)..(5): methylated C nucleotide
  modified_base (7)..(7): methylated C nucleotide
  modified_base (12)..(12): methylated C nucleotide
  modified_base (17)..(17): methylated C nucleotide
  modified_base (19)..(19): methylated C nucleotide
ggcgcgcggttcgccccgcgcatgggc

SEQ ID NO: 874 - DNA, 28 bp, Artificial Sequence
  Synthetic
  modified_base (3)..(3): methylated C nucleotide
  modified_base (5)..(5): methylated C nucleotide
  modified_base (7)..(7): methylated C nucleotide
  modified_base (12)..(12): methylated C nucleotide
  modified_base (17)..(17): methylated C nucleotide
  modified_base (19)..(19): methylated C nucleotide
ggcgcgcggttcgccccgcgcatgggct

SEQ ID NO: 875 - DNA, 29 bp, Artificial Sequence
  Synthetic
  modified_base (3)..(3): methylated C nucleotide
  modified_base (5)..(5): methylated C nucleotide
  modified_base (7)..(7): methylated C nucleotide
  modified_base (12)..(12): methylated C nucleotide
  modified_base (17)..(17): methylated C nucleotide
  modified_base (19)..(19): methylated C nucleotide
ggcgcgcggttcgccccgcgcatgggctc

SEQ ID NO: 876 - DNA, 30 bp, Artificial Sequence
  Synthetic
  modified_base (3)..(3): methylated C nucleotide
  modified_base (5)..(5): methylated C nucleotide
  modified_base (7)..(7): methylated C nucleotide
  modified_base (12)..(12): methylated C nucleotide
  modified_base (17)..(17): methylated C nucleotide
  modified_base (19)..(19): methylated C nucleotide
ggcgcgcggttcgccccgcgcatgggctcc

SEQ ID NO: 877 - DNA, 31 bp, Artificial Sequence
  Synthetic
  modified_base (3)..(3): methylated C nucleotide
  modified_base (5)..(5): methylated C nucleotide
  modified_base (7)..(7): methylated C nucleotide
  modified_base (12)..(12): methylated C nucleotide
  modified_base (17)..(17): methylated C nucleotide
  modified_base (19)..(19): methylated C nucleotide
ggcgcgcggttcgccccgcgcatgggctccg

SEQ ID NO: 878 - DNA, 28 bp, Artificial Sequence
  Synthetic
  modified_base (4)..(4): methylated C nucleotide
  modified_base (6)..(6): methylated C nucleotide
  modified_base (8)..(8): methylated C nucleotide
  modified_base (13)..(13): methylated C nucleotide
  modified_base (18)..(18): methylated C nucleotide
  modified_base (20)..(20): methylated C nucleotide
gggcgcgcggttcgccccgcgcatgggc

SEQ ID NO: 879 - DNA, 30 bp, Artificial Sequence
  Synthetic
  modified_base (5)..(5): methylated C nucleotide
  modified_base (7)..(7): methylated C nucleotide
  modified_base (9)..(9): methylated C nucleotide
  modified_base (14)..(14): methylated C nucleotide
  modified_base (19)..(19): methylated C nucleotide
  modified_base (21)..(21): methylated C nucleotide
ggggcgcgcggttcgccccgcgcatgggct

SEQ ID NO: 880 - DNA, 32 bp, Artificial Sequence
  Synthetic
  modified_base (6)..(6): methylated C nucleotide
  modified_base (8)..(8): methylated C nucleotide
  modified_base (10)..(10): methylated C nucleotide
  modified_base (15)..(15): methylated C nucleotide
  modified_base (20)..(20): methylated C nucleotide
  modified_base (22)..(22): methylated C nucleotide
gggggcgcgcggttcgccccgcgcatgggctc

SEQ ID NO: 881 - DNA, 34 bp, Artificial Sequence
  Synthetic
  modified_base (7)..(7): methylated C nucleotide
  modified_base (9)..(9): methylated C nucleotide
  modified_base (11)..(11): methylated C nucleotide
  modified_base (16)..(16): methylated C nucleotide
  modified_base (21)..(21): methylated C nucleotide
  modified_base (23)..(23): methylated C nucleotide
cgggggcgcgcggttcgccccgcgcatgggctcc

SEQ ID NO: 882 - DNA, 36 bp, Artificial Sequence
  Synthetic
  modified_base (8)..(8): methylated C nucleotide
  modified_base (10)..(10): methylated C nucleotide
  modified_base (12)..(12): methylated C nucleotide
  modified_base (17)..(17): methylated C nucleotide
  modified_base (22)..(22): methylated C nucleotide
  modified_base (24)..(24): methylated C nucleotide
gcgggggcgcgcggttcgccccgcgcatgggctccg

SEQ ID NO: 883 - DNA, 26 bp, Artificial Sequence
  Synthetic
  modified_base (6)..(6): methylated C nucleotide
  modified_base (8)..(8): methylated C nucleotide
  modified_base (10)..(10): methylated C nucleotide
  modified_base (15)..(15): methylated C nucleotide
  modified_base (20)..(20): methylated C nucleotide
  modified_base (22)..(22): methylated C nucleotide
gggggcgcgcggttcgccccgcgcat

SEQ ID NO: 884 - DNA, 26 bp, Artificial Sequence
  Synthetic
  modified_base (9)..(9): methylated C nucleotide
  modified_base (11)..(11): methylated C nucleotide
  modified_base (13)..(13): methylated C nucleotide
  modified_base (18)..(18): methylated C nucleotide
  modified_base (23)..(23): methylated C nucleotide
  modified_base (25)..(25): methylated C nucleotide
ggcgggggcgcgcggttcgccccgcg

SEQ ID NO: 885 - DNA, 26 bp, Artificial Sequence
  Synthetic
  modified_base (12)..(12): methylated C nucleotide
  modified_base (14)..(14): methylated C nucleotide
  modified_base (16)..(16): methylated C nucleotide
  modified_base (21)..(21): methylated C nucleotide
  modified_base (26)..(26): methylated C nucleotide
gggggcgggggcgcgcggttcgcccc

SEQ ID NO: 886 - DNA, 26 bp, Artificial Sequence
  Synthetic
  modified_base (15)..(15): methylated C nucleotide
  modified_base (17)..(17): methylated C nucleotide
  modified_base (19)..(19): methylated C nucleotide
  modified_base (24)..(24): methylated C nucleotide
ggcgggggcgggggcgcgcggttcgc

SEQ ID NO: 887 - DNA, 26 bp, Artificial Sequence
  Synthetic
  modified_base (18)..(18): methylated C nucleotide
  modified_base (20)..(20): methylated C nucleotide
  modified_base (22)..(22): methylated C nucleotide
cggggcgggggcgggggcgcgcggtt

SEQ ID NO: 888 - DNA, 26 bp, Artificial Sequence
  Synthetic
  modified_base (2)..(2): methylated C nucleotide
  modified_base (4)..(4): methylated C nucleotide
  modified_base (9)..(9): methylated C nucleotide
  modified_base (14)..(14): methylated C nucleotide
  modified_base (16)..(16): methylated C nucleotide
gcgcggttcgccccgcgcatgggctc

SEQ ID NO: 889 - DNA, 26 bp, Artificial Sequence
  Synthetic
  modified_base (1)..(1): methylated C nucleotide
  modified_base (6)..(6): methylated C nucleotide
  modified_base (11)..(11): methylated C nucleotide
  modified_base (13)..(13): methylated C nucleotide
cggttcgccccgcgcatgggctccgt

SEQ ID NO: 890 - DNA, 26 bp, Artificial Sequence
  Synthetic
  modified_base (3)..(3): methylated C nucleotide
  modified_base (8)..(8): methylated C nucleotide
  modified_base (10)..(10): methylated C nucleotide
ttcgccccgcgcatgggctccgtccg

SEQ ID NO: 891 - DNA, 26 bp, Artificial Sequence
  Synthetic
  modified_base (5)..(5): methylated C nucleotide
  modified_base (7)..(7): methylated C nucleotide
gccccgcgcatgggctccgtccgcgg

SEQ ID NO: 892 - DNA, 26 bp, Artificial Sequence
  Synthetic
  modified_base (2)..(2): methylated C nucleotide
  modified_base (4)..(4): methylated C nucleotide
ccgcgcatgggctccgtccgcgggcc

SEQ ID NO: 893 - DNA, 24 bp, Artificial Sequence
  Synthetic
  modified_base (1)..(1): methylated C nucleotide
  modified_base (3)..(3): methylated C nucleotide
  modified_base (5)..(5): methylated C nucleotide
  modified_base (10)..(10): methylated C nucleotide
  modified_base (15)..(15): methylated C nucleotide
  modified_base (17)..(17): methylated C nucleotide
cgcgcggttcgccccgcgcatggg

SEQ ID NO: 894 - DNA, 22 bp, Artificial Sequence
  Synthetic
  modified_base (1)..(1): methylated C nucleotide
  modified_base (3)..(3): methylated C nucleotide
  modified_base (8)..(8): methylated C nucleotide
  modified_base (13)..(13): methylated C nucleotide
  modified_base (15)..(15): methylated C nucleotide
cgcggttcgccccgcgcatggg

SEQ ID NO: 895 - DNA, 20 bp, Artificial Sequence
  Synthetic
  modified_base (1)..(1): methylated C nucleotide
  modified_base (6)..(6): methylated C nucleotide
  modified_base (11)..(11): methylated C nucleotide
  modified_base (13)..(13): methylated C nucleotide
cggttcgccccgcgcatggg

SEQ ID NO: 896 - DNA, 18 bp, Artificial Sequence
  Synthetic
  modified_base (4)..(4): methylated C nucleotide
  modified_base (9)..(9): methylated C nucleotide
  modified_base (11)..(11): methylated C nucleotide
gttcgccccgcgcatggg

SEQ ID NO: 897 - DNA, 16 bp, Artificial Sequence
  Synthetic
  modified_base (2)..(2): methylated C nucleotide
  modified_base (7)..(7): methylated C nucleotide
  modified_base (9)..(9): methylated C nucleotide
tcgccccgcgcatggg

SEQ ID NO: 898 - DNA, 15 bp, Artificial Sequence
  Synthetic
  modified_base (1)..(1): methylated C nucleotide
  modified_base (6)..(6): methylated C nucleotide
  modified_base (8)..(8): methylated C nucleotide
cgccccgcgcatggg

SEQ ID NO: 899 - DNA, 24 bp, Artificial Sequence
  Synthetic
  modified_base (3)..(3): methylated C nucleotide
  modified_base (5)..(5): methylated C nucleotide
  modified_base (7)..(7): methylated C nucleotide
  modified_base (12)..(12): methylated C nucleotide
  modified_base (17)..(17): methylated C nucleotide
  modified_base (19)..(19): methylated C nucleotide
ggcgcgcggttcgccccgcgcatg

SEQ ID NO: 900 - DNA, 22 bp, Artificial Sequence
  Synthetic
  modified_base (3)..(3): methylated C nucleotide
  modified_base (5)..(5): methylated C nucleotide
  modified_base (7)..(7): methylated C nucleotide
  modified_base (12)..(12): methylated C nucleotide
  modified_base (17)..(17): methylated C nucleotide
  modified_base (19)..(19): methylated C nucleotide
ggcgcgcggttcgccccgcgca

SEQ ID NO: 901 - DNA, 20 bp, Artificial Sequence
  Synthetic
  modified_base (3)..(3): methylated C nucleotide
  modified_base (5)..(5): methylated C nucleotide
  modified_base (7)..(7): methylated C nucleotide
  modified_base (12)..(12): methylated C nucleotide
  modified_base (17)..(17): methylated C nucleotide
  modified_base (19)..(19): methylated C nucleotide
ggcgcgcggttcgccccgcg

SEQ ID NO: 902 - DNA, 18 bp, Artificial Sequence
  Synthetic
  modified_base (3)..(3): methylated C nucleotide
  modified_base (5)..(5): methylated C nucleotide
  modified_base (7)..(7): methylated C nucleotide
  modified_base (12)..(12): methylated C nucleotide
  modified_base (17)..(17): methylated C nucleotide
ggcgcgcggttcgccccg

SEQ ID NO: 903 - DNA, 16 bp, Artificial Sequence
  Synthetic
  modified_base (3)..(3): methylated C nucleotide
  modified_base (5)..(5): methylated C nucleotide
  modified_base (7)..(7): methylated C nucleotide
  modified_base (12)..(12): methylated C nucleotide
ggcgcgcggttcgccc

SEQ ID NO: 904 - DNA, 15 bp, Artificial Sequence
  Synthetic
  modified_base (3)..(3): methylated C nucleotide
  modified_base (5)..(5): methylated C nucleotide
  modified_base (7)..(7): methylated C nucleotide
  modified_base (12)..(12): methylated C nucleotide
ggcgcgcggttcgcc

SEQ ID NO: 905 - DNA, 26 bp, Artificial Sequence
  Synthetic
  modified_base (3)..(3): methylated C nucleotide
  modified_base (5)..(5): methylated C nucleotide
  modified_base (7)..(7): methylated C nucleotide
  modified_base (12)..(12): methylated C nucleotide
  modified_base (17)..(17): methylated C nucleotide
  modified_base (19)..(19): methylated C nucleotide
ggcgcccggttcgccccgcgcatggg

SEQ ID NO: 906 - DNA, 26 bp, Artificial Sequence
  Synthetic
  modified_base (3)..(3): methylated C nucleotide
  modified_base (5)..(5): methylated C nucleotide
  modified_base (7)..(7): methylated C nucleotide
  modified_base (12)..(12): methylated C nucleotide
  modified_base (17)..(17): methylated C nucleotide
  modified_base (19)..(19): methylated C nucleotide
ggcgcgcggttcgctccgcgcatggg

SEQ ID NO: 907 - DNA, 26 bp, Artificial Sequence
  Synthetic
  modified_base (3)..(3): methylated C nucleotide
  modified_base (5)..(5): methylated C nucleotide
  modified_base (7)..(7): methylated C nucleotide
  modified_base (12)..(12): methylated C nucleotide
  modified_base (17)..(17): methylated C nucleotide
  modified_base (19)..(19): methylated C nucleotide
ggcgcgcagttcgccccgcgcatggg

SEQ ID NO: 908 - DNA, 27 bp, Artificial Sequence
  Synthetic
  modified_base (3)..(3): methylated C nucleotide
  modified_base (8)..(8): methylated C nucleotide
  modified_base (14)..(14): methylated C nucleotide
  modified_base (20)..(20): methylated C nucleotide
  modified_base (22)..(22): methylated C nucleotide
  modified_base (24)..(24): methylated C nucleotide
ggcggggcgggggcgggggcgcgcggt

SEQ ID NO: 909 - DNA, 28 bp, Artificial Sequence
  Synthetic
  modified_base (4)..(4): methylated C nucleotide
  modified_base (9)..(9): methylated C nucleotide
  modified_base (15)..(15): methylated C nucleotide
  modified_base (21)..(21): methylated C nucleotide
  modified_base (23)..(23): methylated C nucleotide
  modified_base (25)..(25): methylated C nucleotide
aggcggggcgggggcgggggcgcgcggt

SEQ ID NO: 910 - DNA, 29 bp, Artificial Sequence
  Synthetic
  modified_base (5)..(5): methylated C nucleotide
  modified_base (10)..(10): methylated C nucleotide
  modified_base (16)..(16): methylated C nucleotide
  modified_base (22)..(22): methylated C nucleotide
  modified_base (24)..(24): methylated C nucleotide
  modified_base (26)..(26): methylated C nucleotide
gaggcggggcgggggcgggggcgcgcggt

SEQ ID NO: 911 - DNA, 30 bp, Artificial Sequence
  Synthetic
  modified_base (6)..(6): methylated C nucleotide
  modified_base (11)..(11): methylated C nucleotide
  modified_base (17)..(17): methylated C nucleotide
  modified_base (23)..(23): methylated C nucleotide
  modified_base (25)..(25): methylated C nucleotide
  modified_base (27)..(27): methylated C nucleotide
cgaggcggggcgggggcgggggcgcgcggt

SEQ ID NO: 912 - DNA, 31 bp, Artificial Sequence
  Synthetic
  modified_base (7)..(7): methylated C nucleotide
  modified_base (12)..(12): methylated C nucleotide
  modified_base (18)..(18): methylated C nucleotide
  modified_base (24)..(24): methylated C nucleotide
  modified_base (26)..(26): methylated C nucleotide
  modified_base (28)..(28): methylated C nucleotide
ccgaggcggggcgggggcgggggcgcgcggt

SEQ ID NO: 913 - DNA, 32 bp, Artificial Sequence
  Synthetic
  modified_base (8)..(8): methylated C nucleotide
  modified_base (13)..(13): methylated C nucleotide
  modified_base (19)..(19): methylated C nucleotide
  modified_base (25)..(25): methylated C nucleotide
  modified_base (27)..(27): methylated C nucleotide
  modified_base (29)..(29): methylated C nucleotide
gccgaggcggggcgggggcgggggcgcgcggt

SEQ ID NO: 914 - DNA, 28 bp, Artificial Sequence
  Synthetic
  modified_base (3)..(3): methylated C nucleotide
  modified_base (8)..(8): methylated C nucleotide
  modified_base (14)..(14): methylated C nucleotide
  modified_base (20)..(20): methylated C nucleotide
  modified_base (22)..(22): methylated C nucleotide
  modified_base (24)..(24): methylated C nucleotide
ggcggggcgggggcgggggcgcgcggtt

SEQ ID NO: 915 - DNA, 29 bp, Artificial Sequence
  Synthetic
  modified_base (3)..(3): methylated C nucleotide
  modified_base (8)..(8): methylated C nucleotide
  modified_base (14)..(14): methylated C nucleotide
  modified_base (20)..(20): methylated C nucleotide
  modified_base (22)..(22): methylated C nucleotide
  modified_base (24)..(24): methylated C nucleotide
ggcggggcgggggcgggggcgcgcggttc

SEQ ID NO: 916 - DNA, 30 bp, Artificial Sequence
  Synthetic
  modified_base (3)..(3): methylated C nucleotide
  modified_base (8)..(8): methylated C nucleotide
  modified_base (14)..(14): methylated C nucleotide
  modified_base (20)..(20): methylated C nucleotide
  modified_base (22)..(22): methylated C nucleotide
  modified_base (24)..(24): methylated C nucleotide
ggcggggcgggggcgggggcgcgcggttcg

SEQ ID NO: 917 - DNA, 31 bp, Artificial Sequence
  Synthetic
  modified_base (3)..(3): methylated C nucleotide
  modified_base (8)..(8): methylated C nucleotide
  modified_base (14)..(14): methylated C nucleotide
  modified_base (20)..(20): methylated C nucleotide
  modified_base (22)..(22): methylated C nucleotide
  modified_base (24)..(24): methylated C nucleotide
ggcggggcgggggcgggggcgcgcggttcgc

SEQ ID NO: 918 - DNA, 32 bp, Artificial Sequence
  Synthetic
  modified_base (3)..(3): methylated C nucleotide
  modified_base (8)..(8): methylated C nucleotide
  modified_base (14)..(14): methylated C nucleotide
  modified_base (20)..(20): methylated C nucleotide
  modified_base (22)..(22): methylated C nucleotide
  modified_base (24)..(24): methylated C nucleotide
ggcggggcgggggcgggggcgcgcggttcgcc

SEQ ID NO: 919 - DNA, 29 bp, Artificial Sequence
  Synthetic
  modified_base (4)..(4): methylated C nucleotide
  modified_base (9)..(9): methylated C nucleotide
  modified_base (15)..(15): methylated C nucleotide
  modified_base (21)..(21): methylated C nucleotide
  modified_base (23)..(23): methylated C nucleotide
  modified_base (25)..(25): methylated C nucleotide
aggcggggcgggggcgggggcgcgcggtt

SEQ ID NO: 920 - DNA, 31 bp, Artificial Sequence
  Synthetic
  modified_base (5)..(5): methylated C nucleotide
  modified_base (10)..(10): methylated C nucleotide
  modified_base (16)..(16): methylated C nucleotide
  modified_base (22)..(22): methylated C nucleotide
  modified_base (24)..(24): methylated C nucleotide
  modified_base (26)..(26): methylated C nucleotide
gaggcggggcgggggcgggggcgcgcggttc

SEQ ID NO: 921 - DNA, 33 bp, Artificial Sequence
  Synthetic
  modified_base (6)..(6): methylated C nucleotide
  modified_base (11)..(11): methylated C nucleotide
  modified_base (17)..(17): methylated C nucleotide
  modified_base (23)..(23): methylated C nucleotide
  modified_base (25)..(25): methylated C nucleotide
  modified_base (27)..(27): methylated C nucleotide
cgaggcggggcgggggcgggggcgcgcggttcg

SEQ ID NO: 922 - DNA, 35 bp, Artificial Sequence
  Synthetic
  modified_base (7)..(7): methylated C nucleotide
  modified_base (12)..(12): methylated C nucleotide
  modified_base (18)..(18): methylated C nucleotide
  modified_base (24)..(24): methylated C nucleotide
  modified_base (26)..(26): methylated C nucleotide
  modified_base (28)..(28): methylated C nucleotide
ccgaggcggggcgggggcgggggcgcgcggttcgc

SEQ ID NO: 923 - DNA, 37 bp, Artificial Sequence
  Synthetic
  modified_base (8)..(8): methylated C nucleotide
  modified_base (13)..(13): methylated C nucleotide
  modified_base (19)..(19): methylated C nucleotide
  modified_base (25)..(25): methylated C nucleotide
  modified_base (27)..(27): methylated C nucleotide
  modified_base (29)..(29): methylated C nucleotide
gccgaggcggggcgggggcgggggcgcgcggttcgcc

SEQ ID NO: 924 - DNA, 27 bp, Artificial Sequence
  Synthetic
  modified_base (6)..(6): methylated C nucleotide
  modified_base (11)..(11): methylated C nucleotide
  modified_base (17)..(17): methylated C nucleotide
  modified_base (23)..(23): methylated C nucleotide
  modified_base (25)..(25): methylated C nucleotide
  modified_base (27)..(27): methylated C nucleotide
cgaggcggggcgggggcgggggcgcgc

SEQ ID NO: 925 - DNA, 27 bp, Artificial Sequence
  Synthetic
  modified_base (9)..(9): methylated C nucleotide
  modified_base (14)..(14): methylated C nucleotide
  modified_base (20)..(20): methylated C nucleotide
ggccgaggcggggcgggggcgggggcg

SEQ ID NO: 926 - DNA, 27 bp, Artificial Sequence
  Synthetic
  modified_base (12)..(12): methylated C nucleotide
  modified_base (17)..(17): methylated C nucleotide
  modified_base (23)..(23): methylated C nucleotide
cggggccgaggcggggcgggggcgggg

SEQ ID NO: 927 - DNA, 27 bp, Artificial Sequence
  Synthetic
  modified_base (15)..(15): methylated C nucleotide
  modified_base (20)..(20): methylated C nucleotide
  modified_base (26)..(26): methylated C nucleotide
ggccggggccgaggcggggcgggggcg

SEQ ID NO: 928 - DNA, 27 bp, Artificial Sequence
  Synthetic
  modified_base (18)..(18): methylated C nucleotide
  modified_base (23)..(23): methylated C nucleotide
cagggccggggccgaggcggggcgggg

SEQ ID NO: 929 - DNA, 27 bp, Artificial Sequence
  Synthetic
  modified_base (5)..(5): methylated C nucleotide
  modified_base (11)..(11): methylated C nucleotide
  modified_base (17)..(17): methylated C nucleotide
  modified_base (19)..(19): methylated C nucleotide
  modified_base (21)..(21): methylated C nucleotide
ggggcgggggcgggggcgcgcggttcg

SEQ ID NO: 930 - DNA, 27 bp, Artificial Sequence
  Synthetic
  modified_base (2)..(2): methylated C nucleotide
  modified_base (8)..(8): methylated C nucleotide
  modified_base (14)..(14): methylated C nucleotide
  modified_base (16)..(16): methylated C nucleotide
  modified_base (18)..(18): methylated C nucleotide
gcgggggcgggggcgcgcggttcgccc

SEQ ID NO: 931 - DNA, 27 bp, Artificial Sequence
  Synthetic
  modified_base (5)..(5): methylated C nucleotide
  modified_base (11)..(11): methylated C nucleotide
  modified_base (13)..(13): methylated C nucleotide
  modified_base (15)..(15): methylated C nucleotide
ggggcgggggcgcgcggttcgccccgc

SEQ ID NO: 932 - DNA, 27 bp, Artificial Sequence
  Synthetic
  modified_base (2)..(2): methylated C nucleotide
  modified_base (8)..(8): methylated C nucleotide
  modified_base (10)..(10): methylated C nucleotide
  modified_base (12)..(12): methylated C nucleotide
gcgggggcgcgcggttcgccccgcgca

SEQ ID NO: 933 - DNA, 27 bp, Artificial Sequence
  Synthetic
  modified_base (5)..(5): methylated C nucleotide
  modified_base (7)..(7): methylated C nucleotide
  modified_base (9)..(9): methylated C nucleotide
ggggcgcgcggttcgccccgcgcatgg

SEQ ID NO: 934 - DNA, 25 bp, Artificial Sequence
  Synthetic
  modified_base (1)..(1): methylated C nucleotide
  modified_base (6)..(6): methylated C nucleotide
  modified_base (12)..(12): methylated C nucleotide
  modified_base (18)..(18): methylated C nucleotide
  modified_base (20)..(20): methylated C nucleotide
  modified_base (22)..(22): methylated C nucleotide
cggggcgggggcgggggcgcgcggt

SEQ ID NO: 935 - DNA, 23 bp, Artificial Sequence
  Synthetic
  modified_base (4)..(4): methylated C nucleotide
  modified_base (10)..(10): methylated C nucleotide
  modified_base (16)..(16): methylated C nucleotide
  modified_base (18)..(18): methylated C nucleotide
  modified_base (20)..(20): methylated C nucleotide
gggcgggggcgggggcgcgcggt

SEQ ID NO: 936 - DNA, 21 bp, Artificial Sequence
  Synthetic
  modified_base (2)..(2): methylated C nucleotide
  modified_base (8)..(8): methylated C nucleotide
  modified_base (14)..(14): methylated C nucleotide
  modified_base (16)..(16): methylated C nucleotide
  modified_base (18)..(18): methylated C nucleotide
gcgggggcgggggcgcgcggt

SEQ ID NO: 937 - DNA, 19 bp, Artificial Sequence
  Synthetic
  modified_base (6)..(6): methylated C nucleotide
  modified_base (12)..(12): methylated C nucleotide
  modified_base (14)..(14): methylated C nucleotide
  modified_base (16)..(16): methylated C nucleotide
gggggcgggggcgcgcggt

SEQ ID NO: 938 - DNA, 17 bp, Artificial Sequence
  Synthetic
  modified_base (4)..(4): methylated C nucleotide
  modified_base (10)..(10): methylated C nucleotide
  modified_base (12)..(12): methylated C nucleotide
  modified_base (14)..(14): methylated C nucleotide
gggcgggggcgcgcggt

SEQ ID NO: 939 - DNA, 15 bp, Artificial Sequence
  Synthetic
  modified_base (2)..(2): methylated C nucleotide
  modified_base (8)..(8): methylated C nucleotide
  modified_base (10)..(10): methylated C nucleotide
  modified_base (12)..(12): methylated C nucleotide
gcgggggcgcgcggt

SEQ ID NO: 940 - DNA, 25 bp, Artificial Sequence
  Synthetic
  modified_base (3)..(3): methylated C nucleotide
  modified_base (8)..(8): methylated C nucleotide
  modified_base (14)..(14): methylated C nucleotide
  modified_base (20)..(20): methylated C nucleotide
  modified_base (24)..(24): methylated C nucleotide
ggcggggcgggggcgggggcgcgcg

SEQ ID NO: 941 - DNA, 23 bp, Artificial Sequence
  Synthetic
  modified_base (3)..(3): methylated C nucleotide
  modified_base (8)..(8): methylated C nucleotide
  modified_base (14)..(14): methylated C nucleotide
  modified_base (20)..(20): methylated C nucleotide
  modified_base (22)..(22): methylated C nucleotide
ggcggggcgggggcgggggcgcg

SEQ ID NO: 942 - DNA, 21 bp, Artificial Sequence
  Synthetic
  modified_base (3)..(3): methylated C nucleotide
  modified_base (8)..(8): methylated C nucleotide
  modified_base (14)..(14): methylated C nucleotide
  modified_base (20)..(20): methylated C nucleotide
ggcggggcgggggcgggggcg

SEQ ID NO: 943 - DNA, 19 bp, Artificial Sequence
  Synthetic
  modified_base (3)..(3): methylated C nucleotide
  modified_base (8)..(8): methylated C nucleotide
  modified_base (14)..(14): methylated C nucleotide
ggcggggcgggggcggggg

SEQ ID NO: 944 - DNA, 17 bp, Artificial Sequence
  Synthetic
  modified_base (3)..(3): methylated C nucleotide
  modified_base (8)..(8): methylated C nucleotide
  modified_base (14)..(14): methylated C nucleotide
ggcggggcgggggcggg

SEQ ID NO: 945 - DNA, 15 bp, Artificial Sequence
  Synthetic
  modified_base (3)..(3): methylated C nucleotide
  modified_base (8)..(8): methylated C nucleotide
  modified_base (14)..(14): methylated C nucleotide
ggcggggcgggggcg

SEQ ID NO: 946 - DNA, 27 bp, Artificial Sequence
  Synthetic
  modified_base (3)..(3): methylated C nucleotide
  modified_base (8)..(8): methylated C nucleotide
  modified_base (14)..(14): methylated C nucleotide
  modified_base (20)..(20): methylated C nucleotide
  modified_base (22)..(22): methylated C nucleotide
  modified_base (24)..(24): methylated C nucleotide
ggcgaggcgggggcgggggcgcgcggt

SEQ ID NO: 947 - DNA, 27 bp, Artificial Sequence
  Synthetic
  modified_base (3)..(3): methylated C nucleotide
  modified_base (8)..(8): methylated C nucleotide
  modified_base (14)..(14): methylated C nucleotide
  modified_base (20)..(20): methylated C nucleotide
  modified_base (22)..(22): methylated C nucleotide
  modified_base (24)..(24): methylated C nucleotide
ggcggggcgggggcgggtgcgcgcggt

SEQ ID NO: 948 - DNA, 27 bp, Artificial Sequence
  Synthetic
  modified_base (3)..(3): methylated C nucleotide
  modified_base (8)..(8): methylated C nucleotide
  modified_base (14)..(14): methylated C nucleotide
  modified_base (20)..(20): methylated C nucleotide
  modified_base (22)..(22): methylated C nucleotide
  modified_base (24)..(24): methylated C nucleotide
ggcggggcgcgggcgggggcgcgcggt

SEQ ID NO: 949 - DNA, 32 bp, Artificial Sequence; identical to SEQ ID NO: 76
  Synthetic
  modified_base (2)..(2): methylated C nucleotide
  modified_base (5)..(5): methylated C nucleotide
  modified_base (8)..(8): methylated C nucleotide
  modified_base (11)..(11): methylated C nucleotide
  modified_base (14)..(14): methylated C nucleotide
  modified_base (17)..(17): methylated C nucleotide
  modified_base (23)..(23): methylated C nucleotide
  modified_base (27)..(27): methylated C nucleotide
  modified_base (30)..(30): methylated C nucleotide

SEQ ID NO: 950 - DNA, 33 bp, Artificial Sequence
  Synthetic
  modified_base (3)..(3): methylated C nucleotide
  modified_base (6)..(6): methylated C nucleotide
  modified_base (9)..(9): methylated C nucleotide
  modified_base (12)..(12): methylated C nucleotide
  modified_base (15)..(15): methylated C nucleotide
  modified_base (18)..(18): methylated C nucleotide
  modified_base (24)..(24): methylated C nucleotide
  modified_base (28)..(28): methylated C nucleotide
  modified_base (31)..(31): methylated C nucleotide
cccgccgccgccgccgccgcttacgcccgccgg

SEQ ID NO: 951 - DNA, 34 bp, Artificial Sequence
  Synthetic
  modified_base (4)..(4): methylated C nucleotide
  modified_base (7)..(7): methylated C nucleotide
  modified_base (10)..(10): methylated C nucleotide
  modified_base (13)..(13): methylated C nucleotide
  modified_base (16)..(16): methylated C nucleotide
  modified_base (19)..(19): methylated C nucleotide
  modified_base (25)..(25): methylated C nucleotide
  modified_base (29)..(29): methylated C nucleotide
  modified_base (32)..(32): methylated C nucleotide
acccgccgccgccgccgccgcttacgcccgccgg

SEQ ID NO: 952 - DNA, 35 bp, Artificial Sequence
  Synthetic
  modified_base (5)..(5): methylated C nucleotide
  modified_base (8)..(8): methylated C nucleotide
  modified_base (11)..(11): methylated C nucleotide
  modified_base (14)..(14): methylated C nucleotide
  modified_base (17)..(17): methylated C nucleotide
  modified_base (20)..(20): methylated C nucleotide
  modified_base (26)..(26): methylated C nucleotide
  modified_base (30)..(30): methylated C nucleotide
  modified_base (33)..(33): methylated C nucleotide
cacccgccgccgccgccgccgcttacgcccgccgg

SEQ ID NO: 953 - DNA, 36 bp, Artificial Sequence
  Synthetic
  modified_base (6)..(6): methylated C nucleotide
  modified_base (9)..(9): methylated C nucleotide
  modified_base (12)..(12): methylated C nucleotide
  modified_base (15)..(15): methylated C nucleotide
  modified_base (18)..(18): methylated C nucleotide
  modified_base (21)..(21): methylated C nucleotide
  modified_base (27)..(27): methylated C nucleotide
  modified_base (31)..(31): methylated C nucleotide
  modified_base (34)..(34): methylated C nucleotide
ccacccgccgccgccgccgccgcttacgcccgccgg

SEQ ID NO: 954 - DNA, 37 bp, Artificial Sequence
  Synthetic
  modified_base (7)..(7): methylated C nucleotide
  modified_base (10)..(10): methylated C nucleotide
  modified_base (13)..(13): methylated C nucleotide
  modified_base (16)..(16): methylated C nucleotide
  modified_base (19)..(19): methylated C nucleotide
  modified_base (22)..(22): methylated C nucleotide
  modified_base (28)..(28): methylated C nucleotide
  modified_base (32)..(32): methylated C nucleotide
  modified_base (35)..(35): methylated C nucleotide
cccacccgccgccgccgccgccgcttacgcccgccgg

SEQ ID NO: 955 - DNA, 33 bp, Artificial Sequence
  Synthetic
  modified_base (2)..(2): methylated C nucleotide
  modified_base (5)..(5): methylated C nucleotide
  modified_base (8)..(8): methylated C nucleotide
  modified_base (11)..(11): methylated C nucleotide
  modified_base (14)..(14): methylated C nucleotide
  modified_base (17)..(17): methylated C nucleotide
  modified_base (23)..(23): methylated C nucleotide
  modified_base (27)..(27): methylated C nucleotide
  modified_base (30)..(30): methylated C nucleotide
ccgccgccgccgccgccgcttacgcccgccggc

SEQ ID NO: 956 - DNA, 34 bp, Artificial Sequence
  Synthetic
  modified_base (2)..(2): methylated C nucleotide
  modified_base (5)..(5): methylated C nucleotide
  modified_base (8)..(8): methylated C nucleotide
  modified_base (11)..(11): methylated C nucleotide
  modified_base (14)..(14): methylated C nucleotide
  modified_base (17)..(17): methylated C nucleotide
  modified_base (23)..(23): methylated C nucleotide
  modified_base (27)..(27): methylated C nucleotide
  modified_base (30)..(30): methylated C nucleotide
ccgccgccgccgccgccgcttacgcccgccggcc

SEQ ID NO: 957 - DNA, 35 bp, Artificial Sequence
  Synthetic
  modified_base (2)..(2): methylated C nucleotide
  modified_base (5)..(5): methylated C nucleotide
  modified_base (8)..(8): methylated C nucleotide
  modified_base (11)..(11): methylated C nucleotide
  modified_base (14)..(14): methylated C nucleotide
  modified_base (17)..(17): methylated C nucleotide
  modified_base (23)..(23): methylated C nucleotide
  modified_base (27)..(27): methylated C nucleotide
  modified_base (30)..(30): methylated C nucleotide
ccgccgccgccgccgccgcttacgcccgccggccc

SEQ ID NO: 958 - DNA, 36 bp, Artificial Sequence
  Synthetic
  modified_base (2)..(2): methylated C nucleotide
  modified_base (5)..(5): methylated C nucleotide
  modified_base (8)..(8): methylated C nucleotide
  modified_base (11)..(11): methylated C nucleotide
  modified_base (14)..(14): methylated C nucleotide
  modified_base (17)..(17): methylated C nucleotide
  modified_base (23)..(23): methylated C nucleotide
  modified_base (27)..(27): methylated C nucleotide
  modified_base (30)..(30): methylated C nucleotide
ccgccgccgccgccgccgcttacgcccgccggcccc

SEQ ID NO: 959 - DNA, 37 bp, Artificial Sequence
  Synthetic
  modified_base (2)..(2): methylated C nucleotide
  modified_base (5)..(5): methylated C nucleotide
  modified_base (8)..(8): methylated C nucleotide
  modified_base (11)..(11): methylated C nucleotide
  modified_base (14)..(14): methylated C nucleotide
  modified_base (17)..(17): methylated C nucleotide
  modified_base (23)..(23): methylated C nucleotide
  modified_base (27)..(27): methylated C nucleotide
  modified_base (30)..(30): methylated C nucleotide
ccgccgccgccgccgccgcttacgcccgccggccccg

SEQ ID NO: 960 - DNA, 34 bp, Artificial Sequence
  Synthetic
  modified_base (3)..(3): methylated C nucleotide
  modified_base (6)..(6): methylated C nucleotide
  modified_base (9)..(9): methylated C nucleotide
  modified_base (12)..(12): methylated C nucleotide
  modified_base (15)..(15): methylated C nucleotide
  modified_base (18)..(18): methylated C nucleotide
  modified_base (24)..(24): methylated C nucleotide
  modified_base (28)..(28): methylated C nucleotide
  modified_base (31)..(31): methylated C nucleotide
cccgccgccgccgccgccgcttacgcccgccggc

SEQ ID NO: 961 - DNA, 36 bp, Artificial Sequence
  Synthetic
  modified_base (4)..(4): methylated C nucleotide
  modified_base (7)..(7): methylated C nucleotide
  modified_base (10)..(10): methylated C nucleotide
  modified_base (13)..(13): methylated C nucleotide
  modified_base (16)..(16): methylated C nucleotide
  modified_base (19)..(19): methylated C nucleotide
  modified_base (25)..(25): methylated C nucleotide
  modified_base (29)..(29): methylated C nucleotide
  modified_base (32)..(32): methylated C nucleotide
acccgccgccgccgccgccgcttacgcccgccggcc

SEQ ID NO: 962 - DNA, 38 bp, Artificial Sequence
  Synthetic
  modified_base (5)..(5): methylated C nucleotide
  modified_base (8)..(8): methylated C nucleotide
  modified_base (11)..(11): methylated C nucleotide
  modified_base (14)..(14): methylated C nucleotide
  modified_base (17)..(17): methylated C nucleotide
  modified_base (20)..(20): methylated C nucleotide
  modified_base (26)..(26): methylated C nucleotide
  modified_base (30)..(30): methylated C nucleotide
  modified_base (33)..(33): methylated C nucleotide
cacccgccgccgccgccgccgcttacgcccgccggccc

SEQ ID NO: 963 - DNA, 40 bp, Artificial Sequence
  Synthetic
  modified_base (6)..(6): methylated C nucleotide
  modified_base (9)..(9): methylated C nucleotide
  modified_base (12)..(12): methylated C nucleotide
  modified_base (15)..(15): methylated C nucleotide
  modified_base (18)..(18): methylated C nucleotide
  modified_base (21)..(21): methylated C nucleotide
  modified_base (27)..(27): methylated C nucleotide
  modified_base (31)..(31): methylated C nucleotide
  modified_base (34)..(34): methylated C nucleotide
ccacccgccgccgccgccgccgcttacgcccgccggcccc

SEQ ID NO: 964 - DNA, 42 bp, Artificial Sequence
  Synthetic
  modified_base (7)..(7): methylated C nucleotide
  modified_base (10)..(10): methylated C nucleotide
  modified_base (13)..(13): methylated C nucleotide
  modified_base (16)..(16): methylated C nucleotide
  modified_base (19)..(19): methylated C nucleotide
  modified_base (22)..(22): methylated C nucleotide
  modified_base (28)..(28): methylated C nucleotide
  modified_base (32)..(32): methylated C nucleotide
  modified_base (35)..(35): methylated C nucleotide
cccacccgccgccgccgccgccgcttacgcccgccggccccg

SEQ ID NO: 965 - DNA, 32 bp, Artificial Sequence
  Synthetic
  modified_base (5)..(5): methylated C nucleotide
  modified_base (8)..(8): methylated C nucleotide
  modified_base (11)..(11): methylated C nucleotide
  modified_base (14)..(14): methylated C nucleotide
  modified_base (17)..(17): methylated C nucleotide
  modified_base (20)..(20): methylated C nucleotide
  modified_base (26)..(26): methylated C nucleotide
  modified_base (30)..(30): methylated C nucleotide
cacccgccgccgccgccgccgcttacgcccgc

SEQ ID NO: 966 - DNA, 32 bp, Artificial Sequence
  Synthetic
  modified_base (8)..(8): methylated C nucleotide
  modified_base (11)..(11): methylated C nucleotide
  modified_base (14)..(14): methylated C nucleotide
  modified_base (17)..(17): methylated C nucleotide
  modified_base (20)..(20): methylated C nucleotide
  modified_base (23)..(23): methylated C nucleotide
  modified_base (29)..(29): methylated C nucleotide
acccacccgccgccgccgccgccgcttacgcc

SEQ ID NO: 967 - DNA, 32 bp, Artificial Sequence
  Synthetic
  modified_base (11)..(11): methylated C nucleotide
  modified_base (14)..(14): methylated C nucleotide
  modified_base (17)..(17): methylated C nucleotide
  modified_base (20)..(20): methylated C nucleotide
  modified_base (23)..(23): methylated C nucleotide
  modified_base (26)..(26): methylated C nucleotide
  modified_base (32)..(32): methylated C nucleotide
cccacccacccgccgccgccgccgccgcttac

SEQ ID NO: 968 - DNA, 32 bp, Artificial Sequence
  Synthetic
  modified_base (14)..(14): methylated C nucleotide
  modified_base (17)..(17): methylated C nucleotide
  modified_base (20)..(20): methylated C nucleotide
  modified_base (23)..(23): methylated C nucleotide
  modified_base (26)..(26): methylated C nucleotide
  modified_base (29)..(29): methylated C nucleotide
ggccccacccacccgccgccgccgccgccgct

SEQ ID NO: 969 - DNA, 32 bp, Artificial Sequence
  Synthetic
  modified_base (17)..(17): methylated C nucleotide
  modified_base (20)..(20): methylated C nucleotide
  modified_base (23)..(23): methylated C nucleotide
  modified_base (26)..(26): methylated C nucleotide
  modified_base (29)..(29): methylated C nucleotide
  modified_base (32)..(32): methylated C nucleotide
cccggccccacccacccgccgccgccgccgcc

SEQ ID NO: 970 - DNA, 32 bp, Artificial Sequence
  Synthetic
  modified_base (2)..(2): methylated C nucleotide
  modified_base (5)..(5): methylated C nucleotide
  modified_base (8)..(8): methylated C nucleotide
  modified_base (11)..(11): methylated C nucleotide
  modified_base (14)..(14): methylated C nucleotide
  modified_base (20)..(20): methylated C nucleotide
  modified_base (24)..(24): methylated C nucleotide
  modified_base (27)..(27): methylated C nucleotide
ccgccgccgccgccgcttacgcccgccggccc

SEQ ID NO: 971 - DNA, 32 bp, Artificial Sequence
  Synthetic
  modified_base (2)..(2): methylated C nucleotide
  modified_base (5)..(5): methylated C nucleotide
  modified_base (8)..(8): methylated C nucleotide
  modified_base (11)..(11): methylated C nucleotide
  modified_base (17)..(17): methylated C nucleotide
  modified_base (21)..(21): methylated C nucleotide
  modified_base (24)..(24): methylated C nucleotide
ccgccgccgccgcttacgcccgccggccccgc

SEQ ID NO: 972 - DNA, 32 bp, Artificial Sequence
  Synthetic
  modified_base (2)..(2): methylated C nucleotide
  modified_base (5)..(5): methylated C nucleotide
  modified_base (8)..(8): methylated C nucleotide
  modified_base (14)..(14): methylated C nucleotide
  modified_base (18)..(18): methylated C nucleotide
  modified_base (21)..(21): methylated C nucleotide
ccgccgccgcttacgcccgccggccccgcgcc

SEQ ID NO: 973 - DNA, 32 bp, Artificial Sequence
  Synthetic
  modified_base (2)..(2): methylated C nucleotide
  modified_base (5)..(5): methylated C nucleotide
  modified_base (11)..(11): methylated C nucleotide
  modified_base (15)..(15): methylated C nucleotide
  modified_base (18)..(18): methylated C nucleotide
ccgccgcttacgcccgccggccccgcgccccc

SEQ ID NO: 974 - DNA, 32 bp, Artificial Sequence
  Synthetic
  modified_base (2)..(2): methylated C nucleotide
  modified_base (8)..(8): methylated C nucleotide
  modified_base (12)..(12): methylated C nucleotide
  modified_base (15)..(15): methylated C nucleotide
ccgcttacgcccgccggccccgcgcccccggc

SEQ ID NO: 975 - DNA, 30 bp, Artificial Sequence
  Synthetic
  modified_base (3)..(3): methylated C nucleotide
  modified_base (6)..(6): methylated C nucleotide
  modified_base (9)..(9): methylated C nucleotide
  modified_base (12)..(12): methylated C nucleotide
  modified_base (15)..(15): methylated C nucleotide
  modified_base (21)..(21): methylated C nucleotide
  modified_base (25)..(25): methylated C nucleotide
  modified_base (28)..(28): methylated C nucleotide
gccgccgccgccgccgcttacgcccgccgg

SEQ ID NO: 976 - DNA, 28 bp, Artificial Sequence
  Synthetic
  modified_base (1)..(1): methylated C nucleotide
  modified_base (4)..(4): methylated C nucleotide
  modified_base (7)..(7): methylated C nucleotide
  modified_base (10)..(10): methylated C nucleotide
  modified_base (13)..(13): methylated C nucleotide
  modified_base (19)..(19): methylated C nucleotide
  modified_base (23)..(23): methylated C nucleotide
  modified_base (26)..(26): methylated C nucleotide
cgccgccgccgccgcttacgcccgccgg

SEQ ID NO: 977 - DNA, 26 bp, Artificial Sequence
  Synthetic
  modified_base (2)..(2): methylated C nucleotide
  modified_base (5)..(5): methylated C nucleotide
  modified_base (8)..(8): methylated C nucleotide
  modified_base (11)..(11): methylated C nucleotide
  modified_base (17)..(17): methylated C nucleotide
  modified_base (21)..(21): methylated C nucleotide
  modified_base (24)..(24): methylated C nucleotide
ccgccgccgccgcttacgcccgccgg

SEQ ID NO: 978 - DNA, 24 bp, Artificial Sequence
  Synthetic
  modified_base (3)..(3): methylated C nucleotide
  modified_base (6)..(6): methylated C nucleotide
  modified_base (9)..(9): methylated C nucleotide
  modified_base (15)..(15): methylated C nucleotide
  modified_base (19)..(19): methylated C nucleotide
  modified_base (22)..(22): methylated C nucleotide
gccgccgccgcttacgcccgccgg

SEQ ID NO: 979 - DNA, 22 bp, Artificial Sequence
  Synthetic
  modified_base (1)..(1): methylated C nucleotide
  modified_base (4)..(4): methylated C nucleotide
  modified_base (7)..(7): methylated C nucleotide
  modified_base (13)..(13): methylated C nucleotide
  modified_base (17)..(17): methylated C nucleotide
  modified_base (20)..(20): methylated C nucleotide
cgccgccgcttacgcccgccgg

SEQ ID NO: 980 - DNA, 20 bp, Artificial Sequence
  Synthetic
  modified_base (2)..(2): methylated C nucleotide
  modified_base (5)..(5): methylated C nucleotide
  modified_base (11)..(11): methylated C nucleotide
  modified_base (15)..(15): methylated C nucleotide
  modified_base (18)..(18): methylated C nucleotide
ccgccgcttacgcccgccgg

SEQ ID NO: 981 - DNA, 18 bp, Artificial Sequence
  Synthetic
  modified_base (3)..(3): methylated C nucleotide
  modified_base (9)..(9): methylated C nucleotide
  modified_base (13)..(13): methylated C nucleotide
  modified_base (16)..(16): methylated C nucleotide
gccgcttacgcccgccgg

SEQ ID NO: 982 - DNA, 16 bp, Artificial Sequence
  Synthetic
  modified_base (1)..(1): methylated C nucleotide
  modified_base (7)..(7): methylated C nucleotide
  modified_base (11)..(11): methylated C nucleotide
  modified_base (14)..(14): methylated C nucleotide
cgcttacgcccgccgg

SEQ ID NO: 983 - DNA, 15 bp, Artificial Sequence
  Synthetic
  modified_base (6)..(6): methylated C nucleotide
  modified_base (10)..(10): methylated C nucleotide
  modified_base (13)..(13): methylated C nucleotide
gcttacgcccgccgg

SEQ ID NO: 984 - DNA, 30 bp, Artificial Sequence
  Synthetic
  modified_base (2)..(2): methylated C nucleotide
  modified_base (5)..(5): methylated C nucleotide
  modified_base (8)..(8): methylated C nucleotide
  modified_base (11)..(11): methylated C nucleotide
  modified_base (14)..(14): methylated C nucleotide
  modified_base (17)..(17): methylated C nucleotide
  modified_base (23)..(23): methylated C nucleotide
  modified_base (27)..(27): methylated C nucleotide
  modified_base (30)..(30): methylated C nucleotide
ccgccgccgccgccgccgcttacgcccgcc

SEQ ID NO: 985 - DNA, 28 bp, Artificial Sequence
  Synthetic
  modified_base (2)..(2): methylated C nucleotide
  modified_base (5)..(5): methylated C nucleotide
  modified_base (8)..(8): methylated C nucleotide
  modified_base (11)..(11): methylated C nucleotide
  modified_base (14)..(14): methylated C nucleotide
  modified_base (17)..(17): methylated C nucleotide
  modified_base (23)..(23): methylated C nucleotide
  modified_base (27)..(27): methylated C nucleotide
ccgccgccgccgccgccgcttacgcccg

SEQ ID NO: 986 - DNA, 26 bp, Artificial Sequence
  Synthetic
  modified_base (2)..(2): methylated C nucleotide
  modified_base (5)..(5): methylated C nucleotide
  modified_base (8)..(8): methylated C nucleotide
  modified_base (11)..(11): methylated C nucleotide
  modified_base (14)..(14): methylated C nucleotide
  modified_base (17)..(17): methylated C nucleotide
  modified_base (23)..(23): methylated C nucleotide
ccgccgccgccgccgccgcttacgcc

SEQ ID NO: 987 - DNA, 24 bp, Artificial Sequence
  Synthetic
  modified_base (2)..(2): methylated C nucleotide
  modified_base (5)..(5): methylated C nucleotide
  modified_base (8)..(8): methylated C nucleotide
  modified_base (11)..(11): methylated C nucleotide
  modified_base (14)..(14): methylated C nucleotide
  modified_base (17)..(17): methylated C nucleotide
  modified_base (23)..(23): methylated C nucleotide
ccgccgccgccgccgccgcttacg

SEQ ID NO: 988 - DNA, 22 bp, Artificial Sequence
  Synthetic
  modified_base (2)..(2): methylated C nucleotide
  modified_base (5)..(5): methylated C nucleotide
  modified_base (8)..(8): methylated C nucleotide
  modified_base (11)..(11): methylated C nucleotide
  modified_base (14)..(14): methylated C nucleotide
  modified_base (17)..(17): methylated C nucleotide
ccgccgccgccgccgccgctta

SEQ ID NO: 989 - DNA, 20 bp, Artificial Sequence
  Synthetic
  modified_base (2)..(2): methylated C nucleotide
  modified_base (5)..(5): methylated C nucleotide
  modified_base (8)..(8): methylated C nucleotide
  modified_base (11)..(11): methylated C nucleotide
  modified_base (14)..(14): methylated C nucleotide
  modified_base (17)..(17): methylated C nucleotide
ccgccgccgccgccgccgct

SEQ ID NO: 990 - DNA, 18 bp, Artificial Sequence
  Synthetic
  modified_base (2)..(2): methylated C nucleotide
  modified_base (5)..(5): methylated C nucleotide
  modified_base (8)..(8): methylated C nucleotide
  modified_base (11)..(11): methylated C nucleotide
  modified_base (14)..(14): methylated C nucleotide
  modified_base (17)..(17): methylated C nucleotide
ccgccgccgccgccgccg

SEQ ID NO: 991 - DNA, 16 bp, Artificial Sequence
  Synthetic
  modified_base (2)..(2): methylated C nucleotide
  modified_base (5)..(5): methylated C nucleotide
  modified_base (8)..(8): methylated C nucleotide
  modified_base (11)..(11): methylated C nucleotide
  modified_base (14)..(14): methylated C nucleotide
ccgccgccgccgccgc

SEQ ID NO: 992 - DNA, 15 bp, Artificial Sequence
  Synthetic
  modified_base (2)..(2): methylated C nucleotide
  modified_base (5)..(5): methylated C nucleotide
  modified_base (8)..(8): methylated C nucleotide
  modified_base (11)..(11): methylated C nucleotide
  modified_base (14)..(14): methylated C nucleotide
ccgccgccgccgccg

SEQ ID NO: 993 - DNA, 32 bp, Artificial Sequence
  Synthetic
  modified_base (2)..(2): methylated C nucleotide
  modified_base (5)..(5): methylated C nucleotide
  modified_base (8)..(8): methylated C nucleotide
  modified_base (11)..(11): methylated C nucleotide
  modified_base (14)..(14): methylated C nucleotide
  modified_base (17)..(17): methylated C nucleotide
  modified_base (23)..(23): methylated C nucleotide
  modified_base (27)..(27): methylated C nucleotide
  modified_base (30)..(30): methylated C nucleotide
ccgccgccaccgccgccgcttacgcccgccgg

SEQ ID NO: 994 - DNA, 32 bp, Artificial Sequence
  Synthetic
  modified_base (2)..(2): methylated C nucleotide
  modified_base (5)..(5): methylated C nucleotide
  modified_base (8)..(8): methylated C nucleotide
  modified_base (11)..(11): methylated C nucleotide
  modified_base (14)..(14): methylated C nucleotide
  modified_base (17)..(17): methylated C nucleotide
  modified_base (23)..(23): methylated C nucleotide
  modified_base (27)..(27): methylated C nucleotide
  modified_base (30)..(30): methylated C nucleotide
ccgccgccgccgccgccgcttccgcccgccgg

SEQ ID NO: 995 - DNA, 32 bp, Artificial Sequence
  Synthetic
  modified_base (2)..(2): methylated C nucleotide
  modified_base (5)..(5): methylated C nucleotide
  modified_base (8)..(8): methylated C nucleotide
  modified_base (11)..(11): methylated C nucleotide
  modified_base (14)..(14): methylated C nucleotide
  modified_base (17)..(17): methylated C nucleotide
  modified_base (23)..(23): methylated C nucleotide
  modified_base (27)..(27): methylated C nucleotide
  modified_base (30)..(30): methylated C nucleotide
ccgccgccgccgccaccgcttacgcccgccgg

SEQ ID NO: 996 - DNA, 28 bp, Artificial Sequence
  Synthetic
  modified_base (2)..(2): methylated C nucleotide
  modified_base (6)..(6): methylated C nucleotide
  modified_base (9)..(9): methylated C nucleotide
  modified_base (18)..(18): methylated C nucleotide
  modified_base (21)..(21): methylated C nucleotide
  modified_base (25)..(25): methylated C nucleotide
ccgcccgccgcagcccccgacgcccgct

SEQ ID NO: 997 - DNA, 29 bp, Artificial Sequence
  Synthetic
  modified_base (3)..(3): methylated C nucleotide
  modified_base (7)..(7): methylated C nucleotide
  modified_base (10)..(10): methylated C nucleotide
  modified_base (19)..(19): methylated C nucleotide
  modified_base (22)..(22): methylated C nucleotide
  modified_base (26)..(26): methylated C nucleotide
cccgcccgccgcagcccccgacgcccgct

SEQ ID NO: 998 - DNA, 30 bp, Artificial Sequence
  Synthetic
  modified_base (4)..(4): methylated C nucleotide
  modified_base (8)..(8): methylated C nucleotide
  modified_base (11)..(11): methylated C nucleotide
  modified_base (20)..(20): methylated C nucleotide
  modified_base (23)..(23): methylated C nucleotide
  modified_base (27)..(27): methylated C nucleotide
ccccgcccgccgcagcccccgacgcccgct

SEQ ID NO: 999 - DNA, 31 bp, Artificial Sequence
  Synthetic
  modified_base (5)..(5): methylated C nucleotide
  modified_base (9)..(9): methylated C nucleotide
  modified_base (12)..(12): methylated C nucleotide
  modified_base (21)..(21): methylated C nucleotide
  modified_base (24)..(24): methylated C nucleotide
  modified_base (28)..(28): methylated C nucleotide
cccccgcccgccgcagcccccgacgcccgct

SEQ ID NO: 1000 - DNA, 32 bp, Artificial Sequence
  Synthetic
  modified_base (6)..(6): methylated C nucleotide
  modified_base (10)..(10): methylated C nucleotide
  modified_base (13)..(13): methylated C nucleotide
  modified_base (22)..(22): methylated C nucleotide
  modified_base (25)..(25): methylated C nucleotide
  modified_base (29)..(29): methylated C nucleotide
gcccccgcccgccgcagcccccgacgcccgct

SEQ ID NO: 1001 - DNA, 33 bp, Artificial Sequence
  Synthetic
  modified_base (7)..(7): methylated C nucleotide
  modified_base (11)..(11): methylated C nucleotide
  modified_base (14)..(14): methylated C nucleotide
  modified_base (23)..(23): methylated C nucleotide
  modified_base (26)..(26): methylated C nucleotide
  modified_base (30)..(30): methylated C nucleotide
ggcccccgcccgccgcagcccccgacgcccgct

SEQ ID NO: 1002 - DNA, 29 bp, Artificial Sequence
  Synthetic
  modified_base (2)..(2): methylated C nucleotide
  modified_base (6)..(6): methylated C nucleotide
  modified_base (9)..(9): methylated C nucleotide
  modified_base (18)..(18): methylated C nucleotide
  modified_base (21)..(21): methylated C nucleotide
  modified_base (25)..(25): methylated C nucleotide
ccgcccgccgcagcccccgacgcccgctc

SEQ ID NO: 1003 - DNA, 30 bp, Artificial Sequence
  Synthetic
  modified_base (2)..(2): methylated C nucleotide
  modified_base (6)..(6): methylated C nucleotide
  modified_base (9)..(9): methylated C nucleotide
  modified_base (18)..(18): methylated C nucleotide
  modified_base (21)..(21): methylated C nucleotide
  modified_base (25)..(25): methylated C nucleotide
ccgcccgccgcagcccccgacgcccgctca

SEQ ID NO: 1004 - DNA, 31 bp, Artificial Sequence
  Synthetic
  modified_base (2)..(2): methylated C nucleotide
  modified_base (6)..(6): methylated C nucleotide
  modified_base (9)..(9): methylated C nucleotide
  modified_base (18)..(18): methylated C nucleotide
  modified_base (25)..(25): methylated C nucleotide
ccgcccgccgcagcccccgacgcccgctcac

SEQ ID NO: 1005 - DNA, 32 bp, Artificial Sequence
  Synthetic
  modified_base (2)..(2): methylated C nucleotide
  modified_base (6)..(6): methylated C nucleotide
  modified_base (9)..(9): methylated C nucleotide
  modified_base (18)..(18): methylated C nucleotide
  modified_base (21)..(21): methylated C nucleotide
  modified_base (25)..(25): methylated C nucleotide
ccgcccgccgcagcccccgacgcccgctcacc

SEQ ID NO: 1006 - DNA, 33 bp, Artificial Sequence
  Synthetic
  modified_base (2)..(2): methylated C nucleotide
  modified_base (6)..(6): methylated C nucleotide
  modified_base (9)..(9): methylated C nucleotide
  modified_base (18)..(18): methylated C nucleotide
  modified_base (21)..(21): methylated C nucleotide
  modified_base (25)..(25): methylated C nucleotide
ccgcccgccgcagcccccgacgcccgctcacct

SEQ ID NO: 1007 - DNA, 30 bp, Artificial Sequence
  Synthetic
  modified_base (3)..(3): methylated C nucleotide
  modified_base (7)..(7): methylated C nucleotide
  modified_base (10)..(10): methylated C nucleotide
  modified_base (19)..(19): methylated C nucleotide
  modified_base (22)..(22): methylated C nucleotide
  modified_base (26)..(26): methylated C nucleotide
cccgcccgccgcagcccccgacgcccgctc

SEQ ID NO: 1008 - DNA, 32 bp, Artificial Sequence
  Synthetic
  modified_base (4)..(4): methylated C nucleotide
  modified_base (8)..(8): methylated C nucleotide
  modified_base (11)..(11): methylated C nucleotide
  modified_base (20)..(20): methylated C nucleotide
  modified_base (23)..(23): methylated C nucleotide
  modified_base (27)..(27): methylated C nucleotide
ccccgcccgccgcagcccccgacgcccgctca

SEQ ID NO: 1009 - DNA, 34 bp, Artificial Sequence
  Synthetic
  modified_base (5)..(5): methylated C nucleotide
  modified_base (9)..(9): methylated C nucleotide
  modified_base (12)..(12): methylated C nucleotide
  modified_base (21)..(21): methylated C nucleotide
  modified_base (24)..(24): methylated C nucleotide
  modified_base (28)..(28): methylated C nucleotide
cccccgcccgccgcagcccccgacgcccgctcac

SEQ ID NO: 1010 - DNA, 36 bp, Artificial Sequence
  Synthetic
  modified_base (6)..(6): methylated C nucleotide
  modified_base (10)..(10): methylated C nucleotide
  modified_base (13)..(13): methylated C nucleotide
  modified_base (22)..(22): methylated C nucleotide
  modified_base (25)..(25): methylated C nucleotide
  modified_base (29)..(29): methylated C nucleotide
gcccccgcccgccgcagcccccgacgcccgctcacc

SEQ ID NO: 1011 - DNA, 38 bp, Artificial Sequence
  Synthetic
  modified_base (7)..(7): methylated C nucleotide
  modified_base (11)..(11): methylated C nucleotide
  modified_base (14)..(14): methylated C nucleotide
  modified_base (23)..(23): methylated C nucleotide
  modified_base (26)..(26): methylated C nucleotide
  modified_base (30)..(30): methylated C nucleotide
ggcccccgcccgccgcagcccccgacgcccgctcacct

SEQ ID NO: 1012 - DNA, 28 bp, Artificial Sequence
  Synthetic
  modified_base (5)..(5): methylated C nucleotide
  modified_base (9)..(9): methylated C nucleotide
  modified_base (12)..(12): methylated C nucleotide
  modified_base (21)..(21): methylated C nucleotide
  modified_base (24)..(24): methylated C nucleotide
  modified_base (28)..(28): methylated C nucleotide
cccccgcccgccgcagcccccgacgccc

SEQ ID NO: 1013 - DNA, 28 bp, Artificial Sequence
  Synthetic
  modified_base (8)..(8): methylated C nucleotide
  modified_base (12)..(12): methylated C nucleotide
  modified_base (15)..(15): methylated C nucleotide
  modified_base (24)..(24): methylated C nucleotide
  modified_base (27)..(27): methylated C nucleotide
gggcccccgcccgccgcagcccccgacg

SEQ ID NO: 1014 - DNA, 28 bp, Artificial Sequence
  Synthetic
  modified_base (11)..(11): methylated C nucleotide
  modified_base (15)..(15): methylated C nucleotide
  modified_base (18)..(18): methylated C nucleotide
  modified_base (27)..(27): methylated C nucleotide
aaggggcccccgcccgccgcagcccccg

SEQ ID NO: 1015 - DNA, 28 bp, Artificial Sequence
  Synthetic
  modified_base (14)..(14): methylated C nucleotide
  modified_base (18)..(18): methylated C nucleotide
  modified_base (21)..(21): methylated C nucleotide
aggaaggggcccccgcccgccgcagccc

SEQ ID NO: 1016 - DNA, 28 bp, Artificial Sequence
  Synthetic
  modified_base (17)..(17): methylated C nucleotide
  modified_base (21)..(21): methylated C nucleotide
  modified_base (24)..(24): methylated C nucleotide
gggaggaaggggcccccgcccgccgcag

SEQ ID NO: 1017 - DNA, 28 bp, Artificial Sequence
  Synthetic
  modified_base (3)..(3): methylated C nucleotide
  modified_base (6)..(6): methylated C nucleotide
  modified_base (15)..(15): methylated C nucleotide
  modified_base (18)..(18): methylated C nucleotide
  modified_base (22)..(22): methylated C nucleotide
cccgccgcagcccccgacgcccgctcac

SEQ ID NO: 1018 - DNA, 28 bp, Artificial Sequence
  Synthetic
  modified_base (3)..(3): methylated C nucleotide
  modified_base (12)..(12): methylated C nucleotide
  modified_base (15)..(15): methylated C nucleotide
  modified_base (19)..(19): methylated C nucleotide
gccgcagcccccgacgcccgctcacctg

SEQ ID NO: 1019 - DNA, 28 bp, Artificial Sequence
  Synthetic
  modified_base (9)..(9): methylated C nucleotide
  modified_base (12)..(12): methylated C nucleotide
  modified_base (16)..(16): methylated C nucleotide
gcagcccccgacgcccgctcacctgtgc

SEQ ID NO: 1020 - DNA, 28 bp, Artificial Sequence
  Synthetic
  modified_base (6)..(6): methylated C nucleotide
  modified_base (9)..(9): methylated C nucleotide
  modified_base (13)..(13): methylated C nucleotide
gcccccgacgcccgctcacctgtgcccg

SEQ ID NO: 1021 - DNA, 28 bp, Artificial Sequence
  Synthetic
  modified_base (3)..(3): methylated C nucleotide
  modified_base (6)..(6): methylated C nucleotide
  modified_base (10)..(10): methylated C nucleotide
cccgacgcccgctcacctgtgcccgcgg

SEQ ID NO: 1022 - DNA, 26 bp, Artificial Sequence
  Synthetic
  modified_base (4)..(4): methylated C nucleotide
  modified_base (7)..(7): methylated C nucleotide
  modified_base (16)..(16): methylated C nucleotide
  modified_base (19)..(19): methylated C nucleotide
  modified_base (23)..(23): methylated C nucleotide
gcccgccgcagcccccgacgcccgct

SEQ ID NO: 1023 - DNA, 24 bp, Artificial Sequence
  Synthetic
  modified_base (2)..(2): methylated C nucleotide
  modified_base (5)..(5): methylated C nucleotide
  modified_base (14)..(14): methylated C nucleotide
  modified_base (17)..(17): methylated C nucleotide
  modified_base (21)..(21): methylated C nucleotide
ccgccgcagcccccgacgcccgct

SEQ ID NO: 1024 - DNA, 22 bp, Artificial Sequence
  Synthetic
  modified_base (3)..(3): methylated C nucleotide
  modified_base (12)..(12): methylated C nucleotide
  modified_base (15)..(15): methylated C nucleotide
  modified_base (19)..(19): methylated C nucleotide
gccgcagcccccgacgcccgct

SEQ ID NO: 1025 - DNA, 20 bp, Artificial Sequence
  Synthetic
  modified_base (1)..(1): methylated C nucleotide
  modified_base (10)..(10): methylated C nucleotide
  modified_base (13)..(13): methylated C nucleotide
  modified_base (17)..(17): methylated C nucleotide
cgcagcccccgacgcccgct

SEQ ID NO: 1026 - DNA, 18 bp, Artificial Sequence
  Synthetic
  modified_base (8)..(8): methylated C nucleotide
  modified_base (11)..(11): methylated C nucleotide
  modified_base (15)..(15): methylated C nucleotide
cagcccccgacgcccgct

SEQ ID NO: 1027 - DNA, 16 bp, Artificial Sequence
  Synthetic
  modified_base (6)..(6): methylated C nucleotide
  modified_base (9)..(9): methylated C nucleotide
  modified_base (13)..(13): methylated C nucleotide
gcccccgacgcccgct

SEQ ID NO: 1028 - DNA, 15 bp, Artificial Sequence
  Synthetic
  modified_base (5)..(5): methylated C nucleotide
  modified_base (8)..(8): methylated C nucleotide
  modified_base (12)..(12): methylated C nucleotide
cccccgacgcccgct

SEQ ID NO: 1029 - DNA, 26 bp, Artificial Sequence
  Synthetic
  modified_base (2)..(2): methylated C nucleotide
  modified_base (6)..(6): methylated C nucleotide
  modified_base (9)..(9): methylated C nucleotide
  modified_base (18)..(18): methylated C nucleotide
  modified_base (21)..(21): methylated C nucleotide
  modified_base (25)..(25): methylated C nucleotide
ccgcccgccgcagcccccgacgcccg

SEQ ID NO: 1030 - DNA, 24 bp, Artificial Sequence
  Synthetic
  modified_base (2)..(2): methylated C nucleotide
  modified_base (6)..(6): methylated C nucleotide
  modified_base (9)..(9): methylated C nucleotide
  modified_base (18)..(18): methylated C nucleotide
  modified_base (21)..(21): methylated C nucleotide
ccgcccgccgcagcccccgacgcc

SEQ ID NO: 1031 - DNA, 22 bp, Artificial Sequence
  Synthetic
  modified_base (2)..(2): methylated C nucleotide
  modified_base (6)..(6): methylated C nucleotide
  modified_base (9)..(9): methylated C nucleotide
  modified_base (18)..(18): methylated C nucleotide
  modified_base (21)..(21): methylated C nucleotide
ccgcccgccgcagcccccgacg

SEQ ID NO: 1032 - DNA, 20 bp, Artificial Sequence
  Synthetic
  modified_base (2)..(2): methylated C nucleotide
  modified_base (6)..(6): methylated C nucleotide
  modified_base (9)..(9): methylated C nucleotide
  modified_base (18)..(18): methylated C nucleotide
ccgcccgccgcagcccccga

SEQ ID NO: 1033 - DNA, 18 bp, Artificial Sequence
  Synthetic
  modified_base (2)..(2): methylated C nucleotide
  modified_base (6)..(6): methylated C nucleotide
  modified_base (9)..(9): methylated C nucleotide
  modified_base (18)..(18): methylated C nucleotide
ccgcccgccgcagccccc

SEQ ID NO: 1034 - DNA, 16 bp, Artificial Sequence
  Synthetic
  modified_base (2)..(2): methylated C nucleotide
  modified_base (6)..(6): methylated C nucleotide
  modified_base (9)..(9): methylated C nucleotide
ccgcccgccgcagccc

SEQ ID NO: 1035 - DNA, 15 bp, Artificial Sequence
  Synthetic
  modified_base (2)..(2): methylated C nucleotide
  modified_base (6)..(6): methylated C nucleotide
  modified_base (9)..(9): methylated C nucleotide
ccgcccgccgcagcc

SEQ ID NO: 1036 - DNA, 28 bp, Artificial Sequence
  Synthetic
  modified_base (2)..(2): methylated C nucleotide
  modified_base (6)..(6): methylated C nucleotide
  modified_base (9)..(9): methylated C nucleotide
  modified_base (18)..(18): methylated C nucleotide
  modified_base (21)..(21): methylated C nucleotide
  modified_base (25)..(25): methylated C nucleotide
ccgcacgccgcagcccccgacgcccgct

SEQ ID NO: 1037 - DNA, 28 bp, Artificial Sequence
  Synthetic
  modified_base (2)..(2): methylated C nucleotide
  modified_base (6)..(6): methylated C nucleotide
  modified_base (9)..(9): methylated C nucleotide
  modified_base (18)..(18): methylated C nucleotide
  modified_base (21)..(21): methylated C nucleotide
  modified_base (25)..(25): methylated C nucleotide
ccgcccgccgcagccctcgacgcccgct

SEQ ID NO: 1038 - DNA, 28 bp, Artificial Sequence
  Synthetic
  modified_base (2)..(2): methylated C nucleotide
  modified_base (6)..(6): methylated C nucleotide
  modified_base (9)..(9): methylated C nucleotide
  modified_base (18)..(18): methylated C nucleotide
  modified_base (21)..(21): methylated C nucleotide
  modified_base (25)..(25): methylated C nucleotide
ccgcccgccgcagcgcccgacgcccgct

SEQ ID NO: 1039 - DNA, 29 bp, Artificial Sequence
  Synthetic
  modified_base (2)..(2): methylated C nucleotide
  modified_base (4)..(4): methylated C nucleotide
  modified_base (10)..(10): methylated C nucleotide
  modified_base (17)..(17): methylated C nucleotide
  modified_base (27)..(27): methylated C nucleotide
gcgcgccatcgggccccgccccaccccgg

SEQ ID NO: 1040 - DNA, 30 bp, Artificial Sequence
  Synthetic
  modified_base (3)..(3): methylated C nucleotide
  modified_base (5)..(5): methylated C nucleotide
  modified_base (11)..(11): methylated C nucleotide
  modified_base (18)..(18): methylated C nucleotide
  modified_base (28)..(28): methylated C nucleotide
tgcgcgccatcgggccccgccccaccccgg

SEQ ID NO: 1041 - DNA, 31 bp, Artificial Sequence
  Synthetic
  modified_base (4)..(4): methylated C nucleotide
  modified_base (6)..(6): methylated C nucleotide
  modified_base (12)..(12): methylated C nucleotide
  modified_base (19)..(19): methylated C nucleotide
  modified_base (29)..(29): methylated C nucleotide
ctgcgcgccatcgggccccgccccaccccgg

SEQ ID NO: 1042 - DNA, 32 bp, Artificial Sequence
  Synthetic
  modified_base (5)..(5): methylated C nucleotide
  modified_base (7)..(7): methylated C nucleotide
  modified_base (13)..(13): methylated C nucleotide
  modified_base (20)..(20): methylated C nucleotide
  modified_base (30)..(30): methylated C nucleotide
gctgcgcgccatcgggccccgccccaccccgg

SEQ ID NO: 1043 - DNA, 33 bp, Artificial Sequence
  Synthetic
  modified_base (6)..(6): methylated C nucleotide
  modified_base (8)..(8): methylated C nucleotide
  modified_base (14)..(14): methylated C nucleotide
  modified_base (21)..(21): methylated C nucleotide
  modified_base (31)..(31): methylated C nucleotide
ggctgcgcgccatcgggccccgccccaccccgg

SEQ ID NO: 1044 - DNA, 34 bp, Artificial Sequence
  Synthetic
  modified_base (7)..(7): methylated C nucleotide
  modified_base (9)..(9): methylated C nucleotide
  modified_base (15)..(15): methylated C nucleotide
  modified_base (22)..(22): methylated C nucleotide
  modified_base (32)..(32): methylated C nucleotide
tggctgcgcgccatcgggccccgccccaccccgg

SEQ ID NO: 1045 - DNA, 30 bp, Artificial Sequence
  Synthetic
  modified_base (2)..(2): methylated C nucleotide
  modified_base (4)..(4): methylated C nucleotide
  modified_base (10)..(10): methylated C nucleotide
  modified_base (17)..(17): methylated C nucleotide
  modified_base (27)..(27): methylated C nucleotide
gcgcgccatcgggccccgccccaccccggt

SEQ ID NO: 1046 - DNA, 31 bp, Artificial Sequence
  Synthetic
  modified_base (2)..(2): methylated C nucleotide
  modified_base (4)..(4): methylated C nucleotide
  modified_base (10)..(10): methylated C nucleotide
  modified_base (17)..(17): methylated C nucleotide
  modified_base (27)..(27): methylated C nucleotide
gcgcgccatcgggccccgccccaccccggtt

SEQ ID NO: 1047 - DNA, 32 bp, Artificial Sequence
  Synthetic
  modified_base (2)..(2): methylated C nucleotide
  modified_base (4)..(4): methylated C nucleotide
  modified_base (10)..(10): methylated C nucleotide
  modified_base (17)..(17): methylated C nucleotide
  modified_base (27)..(27): methylated C nucleotide
gcgcgccatcgggccccgccccaccccggttg

SEQ ID NO: 1048 - DNA, 33 bp, Artificial Sequence
  Synthetic
  modified_base (2)..(2): methylated C nucleotide
  modified_base (4)..(4): methylated C nucleotide
  modified_base (10)..(10): methylated C nucleotide
  modified_base (17)..(17): methylated C nucleotide
  modified_base (27)..(27): methylated C nucleotide
gcgcgccatcgggccccgccccaccccggttgg

SEQ ID NO: 1049 - DNA, 34 bp, Artificial Sequence
  Synthetic
  modified_base (2)..(2): methylated C nucleotide
  modified_base (4)..(4): methylated C nucleotide
  modified_base (10)..(10): methylated C nucleotide
  modified_base (17)..(17): methylated C nucleotide
  modified_base (27)..(27): methylated C nucleotide
gcgcgccatcgggccccgccccaccccggttggc

SEQ ID NO: 1050 - DNA, 31 bp, Artificial Sequence
  Synthetic
  modified_base (3)..(3): methylated C nucleotide
  modified_base (5)..(5): methylated C nucleotide
  modified_base (11)..(11): methylated C nucleotide
  modified_base (18)..(18): methylated C nucleotide
  modified_base (28)..(28): methylated C nucleotide
tgcgcgccatcgggccccgccccaccccggt

SEQ ID NO: 1051 - DNA, 33 bp, Artificial Sequence
  Synthetic
  modified_base (4)..(4): methylated C nucleotide
  modified_base (6)..(6): methylated C nucleotide
  modified_base (12)..(12): methylated C nucleotide
  modified_base (19)..(19): methylated C nucleotide
  modified_base (29)..(29): methylated C nucleotide
ctgcgcgccatcgggccccgccccaccccggtt

SEQ ID NO: 1052 - DNA, 35 bp, Artificial Sequence
  Synthetic
  modified_base (5)..(5): methylated C nucleotide
  modified_base (7)..(7): methylated C nucleotide
  modified_base (13)..(13): methylated C nucleotide
  modified_base (20)..(20): methylated C nucleotide
  modified_base (30)..(30): methylated C nucleotide
gctgcgcgccatcgggccccgccccaccccggttg

SEQ ID NO: 1053 - DNA, 37 bp, Artificial Sequence
  Synthetic
  modified_base (6)..(6): methylated C nucleotide
  modified_base (8)..(8): methylated C nucleotide
  modified_base (14)..(14): methylated C nucleotide
  modified_base (21)..(21): methylated C nucleotide
  modified_base (31)..(31): methylated C nucleotide
ggctgcgcgccatcgggccccgccccaccccggttgg

SEQ ID NO: 1054 - DNA, 39 bp, Artificial Sequence
  Synthetic
  modified_base (7)..(7): methylated C nucleotide
  modified_base (9)..(9): methylated C nucleotide
  modified_base (15)..(15): methylated C nucleotide
  modified_base (22)..(22): methylated C nucleotide
  modified_base (32)..(32): methylated C nucleotide
tggctgcgcgccatcgggccccgccccaccccggttggc

SEQ ID NO: 1055 - DNA, 29 bp, Artificial Sequence
  Synthetic
  modified_base (5)..(5): methylated C nucleotide
  modified_base (7)..(7): methylated C nucleotide
  modified_base (13)..(13): methylated C nucleotide
  modified_base (20)..(20): methylated C nucleotide
gctgcgcgccatcgggccccgccccaccc

SEQ ID NO: 1056 - DNA, 29 bp, Artificial Sequence
  Synthetic
  modified_base (8)..(8): methylated C nucleotide
  modified_base (10)..(10): methylated C nucleotide
  modified_base (16)..(16): methylated C nucleotide
  modified_base (23)..(23): methylated C nucleotide
ttggctgcgcgccatcgggccccgcccca

SEQ ID NO: 1057 - DNA, 29 bp, Artificial Sequence
  Synthetic
  modified_base (11)..(11): methylated C nucleotide
  modified_base (13)..(13): methylated C nucleotide
  modified_base (19)..(19): methylated C nucleotide
  modified_base (26)..(26): methylated C nucleotide
ccattggctgcgcgccatcgggccccgcc

SEQ ID NO: 1058 - DNA, 29 bp, Artificial Sequence
  Synthetic
  modified_base (14)..(14): methylated C nucleotide
  modified_base (16)..(16): methylated C nucleotide
  modified_base (22)..(22): methylated C nucleotide
  modified_base (29)..(29): methylated C nucleotide
ctaccattggctgcgcgccatcgggcccc

SEQ ID NO: 1059 - DNA, 29 bp, Artificial Sequence
  Synthetic
  modified_base (17)..(17): methylated C nucleotide
  modified_base (19)..(19): methylated C nucleotide
  modified_base (25)..(25): methylated C nucleotide
ggcctaccattggctgcgcgccatcgggc

SEQ ID NO: 1060 - DNA, 29 bp, Artificial Sequence
  Synthetic
  modified_base (1)..(1): methylated C nucleotide
  modified_base (7)..(7): methylated C nucleotide
  modified_base (14)..(14): methylated C nucleotide
  modified_base (24)..(24): methylated C nucleotide
cgccatcgggccccgccccaccccggttg

SEQ ID NO: 1061 - DNA, 29 bp, Artificial Sequence
  Synthetic
  modified_base (4)..(4): methylated C nucleotide
  modified_base (11)..(11): methylated C nucleotide
  modified_base (21)..(21): methylated C nucleotide
catcgggccccgccccaccccggttggct

SEQ ID NO: 1062 - DNA, 29 bp, Artificial Sequence
  Synthetic
  modified_base (1)..(1): methylated C nucleotide
  modified_base (8)..(8): methylated C nucleotide
  modified_base (18)..(18): methylated C nucleotide
cgggccccgccccaccccggttggctgag

SEQ ID NO: 1063 - DNA, 29 bp, Artificial Sequence
  Synthetic
  modified_base (5)..(5): methylated C nucleotide
  modified_base (15)..(15): methylated C nucleotide
gccccgccccaccccggttggctgagcgg

SEQ ID NO: 1064 - DNA, 29 bp, Artificial Sequence
  Synthetic
  modified_base (2)..(2): methylated C nucleotide
  modified_base (12)..(12): methylated C nucleotide
ccgccccaccccggttggctgagcggccc

SEQ ID NO: 1065 - DNA, 27 bp, Artificial Sequence
  Synthetic
  modified_base (2)..(2): methylated C nucleotide
  modified_base (8)..(8): methylated C nucleotide
  modified_base (15)..(15): methylated C nucleotide
  modified_base (25)..(25): methylated C nucleotide
gcgccatcgggccccgccccaccccgg

SEQ ID NO: 1066 - DNA, 25 bp, Artificial Sequence
  Synthetic
  modified_base (6)..(6): methylated C nucleotide
  modified_base (13)..(13): methylated C nucleotide
  modified_base (23)..(23): methylated C nucleotide
gccatcgggccccgccccaccccgg

SEQ ID NO: 1067 - DNA, 23 bp, Artificial Sequence
  Synthetic
  modified_base (4)..(4): methylated C nucleotide
  modified_base (11)..(11): methylated C nucleotide
  modified_base (21)..(21): methylated C nucleotide
catcgggccccgccccaccccgg

SEQ ID NO: 1068 - DNA, 21 bp, Artificial Sequence
  Synthetic
  modified_base (2)..(2): methylated C nucleotide
  modified_base (9)..(9): methylated C nucleotide
  modified_base (19)..(19): methylated C nucleotide
tcgggccccgccccaccccgg

SEQ ID NO: 1069 - DNA, 19 bp, Artificial Sequence
  Synthetic
  modified_base (7)..(7): methylated C nucleotide
  modified_base (17)..(17): methylated C nucleotide
gggccccgccccaccccgg

SEQ ID NO: 1070 - DNA, 17 bp, Artificial Sequence
  Synthetic
  modified_base (5)..(5): methylated C nucleotide
  modified_base (15)..(15): methylated C nucleotide
gccccgccccaccccgg

SEQ ID NO: 1071 - DNA, 15 bp, Artificial Sequence
  Synthetic
  modified_base (3)..(3): methylated C nucleotide
  modified_base (13)..(13): methylated C nucleotide
cccgccccaccccgg

SEQ ID NO: 1072 - DNA, 27 bp, Artificial Sequence
  Synthetic
  modified_base (2)..(2): methylated C nucleotide
  modified_base (4)..(4): methylated C nucleotide
  modified_base (10)..(10): methylated C nucleotide
  modified_base (17)..(17): methylated C nucleotide
  modified_base (27)..(27): methylated C nucleotide
gcgcgccatcgggccccgccccacccc

SEQ ID NO: 1073 - DNA, 25 bp, Artificial Sequence
  Synthetic
  modified_base (2)..(2): methylated C nucleotide
  modified_base (4)..(4): methylated C nucleotide
  modified_base (10)..(10): methylated C nucleotide
  modified_base (17)..(17): methylated C nucleotide
gcgcgccatcgggccccgccccacc

SEQ ID NO: 1074 - DNA, 23 bp, Artificial Sequence
  Synthetic
  modified_base (2)..(2): methylated C nucleotide
  modified_base (4)..(4): methylated C nucleotide
  modified_base (10)..(10): methylated C nucleotide
  modified_base (17)..(17): methylated C nucleotide
gcgcgccatcgggccccgcccca

SEQ ID NO: 1075 - DNA, 21 bp, Artificial Sequence
  Synthetic
  modified_base (2)..(2): methylated C nucleotide
  modified_base (4)..(4): methylated C nucleotide
  modified_base (10)..(10): methylated C nucleotide
  modified_base (17)..(17): methylated C nucleotide
gcgcgccatcgggccccgccc

SEQ ID NO: 1076 - DNA, 19 bp, Artificial Sequence
  Synthetic
  modified_base (2)..(2): methylated C nucleotide
  modified_base (4)..(4): methylated C nucleotide
  modified_base (10)..(10): methylated C nucleotide
  modified_base (17)..(17): methylated C nucleotide
gcgcgccatcgggccccgc

SEQ ID NO: 1077 - DNA, 17 bp, Artificial Sequence
  Synthetic
  modified_base (2)..(2): methylated C nucleotide
  modified_base (4)..(4): methylated C nucleotide
  modified_base (10)..(10): methylated C nucleotide
  modified_base (17)..(17): methylated C nucleotide
gcgcgccatcgggcccc

SEQ ID NO: 1078 - DNA, 15 bp, Artificial Sequence
  Synthetic
  modified_base (2)..(2): methylated C nucleotide
  modified_base (4)..(4): methylated C nucleotide
  modified_base (10)..(10): methylated C nucleotide
gcgcgccatcgggcc

SEQ ID NO: 1079 - DNA, 29 bp, Artificial Sequence
  Synthetic
  modified_base (2)..(2): methylated C nucleotide
  modified_base (4)..(4): methylated C nucleotide
  modified_base (10)..(10): methylated C nucleotide
  modified_base (17)..(17): methylated C nucleotide
  modified_base (27)..(27): methylated C nucleotide
gcgcgccatcgggcaccgccccaccccgg

SEQ ID NO: 1080 - DNA, 29 bp, Artificial Sequence
  Synthetic
  modified_base (2)..(2): methylated C nucleotide
  modified_base (4)..(4): methylated C nucleotide
  modified_base (10)..(10): methylated C nucleotide
  modified_base (17)..(17): methylated C nucleotide
  modified_base (27)..(27): methylated C nucleotide
gcgcgccatcgggccccgccctaccccgg

SEQ ID NO: 1081 - DNA, 29 bp, Artificial Sequence
  Synthetic
  modified_base (2)..(2): methylated C nucleotide
  modified_base (4)..(4): methylated C nucleotide
  modified_base (10)..(10): methylated C nucleotide
  modified_base (17)..(17): methylated C nucleotide
  modified_base (27)..(27): methylated C nucleotide
gcgcgcgatcgggccccgccccaccccgg

SEQ ID NO: 1082 - DNA, 40 bp, Artificial Sequence; identical to SEQ ID NO: 73
  Synthetic
  modified_base (13)..(13): methylated C nucleotide
  modified_base (15)..(15): methylated C nucleotide
  modified_base (17)..(17): methylated C nucleotide
  modified_base (22)..(22): methylated C nucleotide
  modified_base (27)..(27): methylated C nucleotide
  modified_base (29)..(29): methylated C nucleotide

SEQ ID NO: 1083 - DNA, 41 bp, Artificial Sequence
  Synthetic
  modified_base (14)..(14): methylated C nucleotide
  modified_base (16)..(16): methylated C nucleotide
  modified_base (18)..(18): methylated C nucleotide
  modified_base (23)..(23): methylated C nucleotide
  modified_base (28)..(28): methylated C nucleotide
  modified_base (30)..(30): methylated C nucleotide
gcgggggcgggggcgcgcggttcgccccgcgcatgggctcc

SEQ ID NO: 1084 - DNA, 42 bp, Artificial Sequence
  Synthetic
  modified_base (15)..(15): methylated C nucleotide
  modified_base (17)..(17): methylated C nucleotide
  modified_base (19)..(19): methylated C nucleotide
  modified_base (24)..(24): methylated C nucleotide
  modified_base (29)..(29): methylated C nucleotide
  modified_base (31)..(31): methylated C nucleotide
ggcgggggcgggggcgcgcggttcgccccgcgcatgggctcc

SEQ ID NO: 1085 - DNA, 43 bp, Artificial Sequence
  Synthetic
  modified_base (16)..(16): methylated C nucleotide
  modified_base (18)..(18): methylated C nucleotide
  modified_base (20)..(20): methylated C nucleotide
  modified_base (25)..(25): methylated C nucleotide
  modified_base (30)..(30): methylated C nucleotide
  modified_base (32)..(32): methylated C nucleotide
gggcgggggcgggggcgcgcggttcgccccgcgcatgggctcc

SEQ ID NO: 1086 - DNA, 44 bp, Artificial Sequence
  Synthetic
  modified_base (17)..(17): methylated C nucleotide
  modified_base (19)..(19): methylated C nucleotide
  modified_base (21)..(21): methylated C nucleotide
  modified_base (26)..(26): methylated C nucleotide
  modified_base (31)..(31): methylated C nucleotide
  modified_base (33)..(33): methylated C nucleotide
cgggcgggggcgggggcgcgcggttcgccccgcgcatgggctcc

SEQ ID NO: 1087 - DNA, 45 bp, Artificial Sequence
  Synthetic
  modified_base (18)..(18): methylated C nucleotide
  modified_base (20)..(20): methylated C nucleotide
  modified_base (22)..(22): methylated C nucleotide
  modified_base (27)..(27): methylated C nucleotide
  modified_base (32)..(32): methylated C nucleotide
  modified_base (34)..(34): methylated C nucleotide
gcgggcgggggcgggggcgcgcggttcgccccgcgcatgggctcc

SEQ ID NO: 1088 - DNA, 41 bp, Artificial Sequence
  Synthetic
  modified_base (13)..(13): methylated C nucleotide
  modified_base (15)..(15): methylated C nucleotide
  modified_base (17)..(17): methylated C nucleotide
  modified_base (22)..(22): methylated C nucleotide
  modified_base (27)..(27): methylated C nucleotide
  modified_base (29)..(29): methylated C nucleotide
cgggggcgggggcgcgcggttcgccccgcgcatgggctccg

SEQ ID NO: 1089 - DNA, 42 bp, Artificial Sequence
  Synthetic
  modified_base (13)..(13): methylated C nucleotide
  modified_base (15)..(15): methylated C nucleotide
  modified_base (17)..(17): methylated C nucleotide
  modified_base (22)..(22): methylated C nucleotide
  modified_base (27)..(27): methylated C nucleotide
  modified_base (29)..(29): methylated C nucleotide
cgggggcgggggcgcgcggttcgccccgcgcatgggctccgt

SEQ ID NO: 1090 - DNA, 43 bp, Artificial Sequence
  Synthetic
  modified_base (13)..(13): methylated C nucleotide
  modified_base (15)..(15): methylated C nucleotide
  modified_base (17)..(17): methylated C nucleotide
  modified_base (22)..(22): methylated C nucleotide
  modified_base (27)..(27): methylated C nucleotide
  modified_base (29)..(29): methylated C nucleotide
cgggggcgggggcgcgcggttcgccccgcgcatgggctccgtc

SEQ ID NO: 1091 - DNA, 44 bp, Artificial Sequence
  Synthetic
  modified_base (13)..(13): methylated C nucleotide
  modified_base (15)..(15): methylated C nucleotide
  modified_base (17)..(17): methylated C nucleotide
  modified_base (22)..(22): methylated C nucleotide
  modified_base (27)..(27): methylated C nucleotide
  modified_base (29)..(29): methylated C nucleotide
cgggggcgggggcgcgcggttcgccccgcgcatgggctccgtcc

SEQ ID NO: 1092 - DNA, 45 bp, Artificial Sequence
  Synthetic
  modified_base (13)..(13): methylated C nucleotide
  modified_base (15)..(15): methylated C nucleotide
  modified_base (17)..(17): methylated C nucleotide
  modified_base (22)..(22): methylated C nucleotide
  modified_base (27)..(27): methylated C nucleotide
  modified_base (29)..(29): methylated C nucleotide
cgggggcgggggcgcgcggttcgccccgcgcatgggctccgtccg

SEQ ID NO: 1093 - DNA, 42 bp, Artificial Sequence
  Synthetic
  modified_base (14)..(14): methylated C nucleotide
  modified_base (16)..(16): methylated C nucleotide
  modified_base (18)..(18): methylated C nucleotide
  modified_base (23)..(23): methylated C nucleotide
  modified_base (28)..(28): methylated C nucleotide
  modified_base (30)..(30): methylated C nucleotide
gcgggggcgggggcgcgcggttcgccccgcgcatgggctccg

SEQ ID NO: 1094 - DNA, 44 bp, Artificial Sequence
  Synthetic
  modified_base (15)..(15): methylated C nucleotide
  modified_base (17)..(17): methylated C nucleotide
  modified_base (19)..(19): methylated C nucleotide
  modified_base (24)..(24): methylated C nucleotide
  modified_base (29)..(29): methylated C nucleotide
  modified_base (31)..(31): methylated C nucleotide
ggcgggggcgggggcgcgcggttcgccccgcgcatgggctccgt

SEQ ID NO: 1095 - DNA, 46 bp, Artificial Sequence
  Synthetic
  modified_base (16)..(16): methylated C nucleotide
  modified_base (18)..(18): methylated C nucleotide
  modified_base (20)..(20): methylated C nucleotide
  modified_base (25)..(25): methylated C nucleotide
  modified_base (30)..(30): methylated C nucleotide
  modified_base (32)..(32): methylated C nucleotide
gggcgggggcgggggcgcgcggttcgccccgcgcatgggctccgtc

SEQ ID NO: 1096 - DNA, 48 bp, Artificial Sequence
  Synthetic
  modified_base (17)..(17): methylated C nucleotide
  modified_base (19)..(19): methylated C nucleotide
  modified_base (21)..(21): methylated C nucleotide
  modified_base (26)..(26): methylated C nucleotide
  modified_base (31)..(31): methylated C nucleotide
  modified_base (33)..(33): methylated C nucleotide
cgggcgggggcgggggcgcgcggttcgccccgcgcatgggctccgtcc

SEQ ID NO: 1097 - DNA, 50 bp, Artificial Sequence
  Synthetic
  modified_base (18)..(18): methylated C nucleotide
  modified_base (20)..(20): methylated C nucleotide
  modified_base (22)..(22): methylated C nucleotide
  modified_base (27)..(27): methylated C nucleotide
  modified_base (32)..(32): methylated C nucleotide
  modified_base (34)..(34): methylated C nucleotide
gcgggcgggggcgggggcgcgcggttcgccccgcgcatgggctccgtccg

SEQ ID NO: 1098 - DNA, 40 bp, Artificial Sequence
  Synthetic
  modified_base (16)..(16): methylated C nucleotide
  modified_base (18)..(18): methylated C nucleotide
  modified_base (20)..(20): methylated C nucleotide
  modified_base (25)..(25): methylated C nucleotide
  modified_base (30)..(30): methylated C nucleotide
  modified_base (32)..(32): methylated C nucleotide
gggcgggggcgggggcgcgcggttcgccccgcgcatgggc

SEQ ID NO: 1099 - DNA, 40 bp, Artificial Sequence
  Synthetic
  modified_base (19)..(19): methylated C nucleotide
  modified_base (21)..(21): methylated C nucleotide
  modified_base (23)..(23): methylated C nucleotide
  modified_base (28)..(28): methylated C nucleotide
  modified_base (33)..(33): methylated C nucleotide
  modified_base (35)..(35): methylated C nucleotide
ggcgggcgggggcgggggcgcgcggttcgccccgcgcatg

SEQ ID NO: 1100 - DNA, 40 bp, Artificial Sequence
  Synthetic
  modified_base (22)..(22): methylated C nucleotide
  modified_base (24)..(24): methylated C nucleotide
  modified_base (26)..(26): methylated C nucleotide
  modified_base (31)..(31): methylated C nucleotide
  modified_base (36)..(36): methylated C nucleotide
  modified_base (38)..(38): methylated C nucleotide
gggggcgggcgggggcgggggcgcgcggttcgccccgcgc

SEQ ID NO: 1101 - DNA, 40 bp, Artificial Sequence
  Synthetic
  modified_base (25)..(25): methylated C nucleotide
  modified_base (27)..(27): methylated C nucleotide
  modified_base (29)..(29): methylated C nucleotide
  modified_base (34)..(34): methylated C nucleotide
  modified_base (39)..(39): methylated C nucleotide
ggcgggggcgggcgggggcgggggcgcgcggttcgccccg

SEQ ID NO: 1102 - DNA, 40 bp, Artificial Sequence
  Synthetic
  modified_base (28)..(28): methylated C nucleotide
  modified_base (30)..(30): methylated C nucleotide
  modified_base (32)..(32): methylated C nucleotide
  modified_base (37)..(37): methylated C nucleotide
cggggcgggggcgggcgggggcgggggcgcgcggttcgcc

SEQ ID NO: 1103 - DNA, 40 bp, Artificial Sequence
  Synthetic
  modified_base (10)..(10): methylated C nucleotide
  modified_base (12)..(12): methylated C nucleotide
  modified_base (14)..(14): methylated C nucleotide
  modified_base (19)..(19): methylated C nucleotide
  modified_base (24)..(24): methylated C nucleotide
  modified_base (26)..(26): methylated C nucleotide
gggcgggggcgcgcggttcgccccgcgcatgggctccgtc

SEQ ID NO: 1104 - DNA, 40 bp, Artificial Sequence
  Synthetic
  modified_base (7)..(7): methylated C nucleotide
  modified_base (9)..(9): methylated C nucleotide
  modified_base (11)..(11): methylated C nucleotide
  modified_base (16)..(16): methylated C nucleotide
  modified_base (21)..(21): methylated C nucleotide
  modified_base (23)..(23): methylated C nucleotide
cgggggcgcgcggttcgccccgcgcatgggctccgtccgc

SEQ ID NO: 1105 - DNA, 40 bp, Artificial Sequence
  Synthetic
  modified_base (4)..(4): methylated C nucleotide
  modified_base (6)..(6): methylated C nucleotide
  modified_base (8)..(8): methylated C nucleotide
  modified_base (13)..(13): methylated C nucleotide
  modified_base (18)..(18): methylated C nucleotide
  modified_base (20)..(20): methylated C nucleotide
gggcgcgcggttcgccccgcgcatgggctccgtccgcggc

SEQ ID NO: 1106 - DNA, 40 bp, Artificial Sequence
  Synthetic
  modified_base (1)..(1): methylated C nucleotide
  modified_base (3)..(3): methylated C nucleotide
  modified_base (5)..(5): methylated C nucleotide
  modified_base (10)..(10): methylated C nucleotide
  modified_base (15)..(15): methylated C nucleotide
  modified_base (17)..(17): methylated C nucleotide
cgcgcggttcgccccgcgcatgggctccgtccgcggcggg

SEQ ID NO: 1107 - DNA, 40 bp, Artificial Sequence
  Synthetic
  modified_base (2)..(2): methylated C nucleotide
  modified_base (7)..(7): methylated C nucleotide
  modified_base (12)..(12): methylated C nucleotide
  modified_base (14)..(14): methylated C nucleotide
gcggttcgccccgcgcatgggctccgtccgcggcgggtgc

SEQ ID NO: 1108 - DNA, 38 bp, Artificial Sequence
  Synthetic
  modified_base (11)..(11): methylated C nucleotide
  modified_base (13)..(13): methylated C nucleotide
  modified_base (15)..(15): methylated C nucleotide
  modified_base (20)..(20): methylated C nucleotide
  modified_base (25)..(25): methylated C nucleotide
  modified_base (27)..(27): methylated C nucleotide
ggggcgggggcgcgcggttcgccccgcgcatgggctcc

SEQ ID NO: 1109 - DNA, 36 bp, Artificial Sequence
  Synthetic
  modified_base (9)..(9): methylated C nucleotide
  modified_base (11)..(11): methylated C nucleotide
  modified_base (13)..(13): methylated C nucleotide
  modified_base (18)..(18): methylated C nucleotide
  modified_base (23)..(23): methylated C nucleotide
  modified_base (25)..(25): methylated C nucleotide
ggcgggggcgcgcggttcgccccgcgcatgggctcc

SEQ ID NO: 1110 - DNA, 34 bp, Artificial Sequence; identical to SEQ ID NO: 881
  Synthetic
  modified_base (7)..(7): methylated C nucleotide
  modified_base (9)..(9): methylated C nucleotide
  modified_base (11)..(11): methylated C nucleotide
  modified_base (16)..(16): methylated C nucleotide
  modified_base (21)..(21): methylated C nucleotide
  modified_base (23)..(23): methylated C nucleotide

SEQ ID NO: 1111 - DNA, 32 bp, Artificial Sequence
  Synthetic
  modified_base (5)..(5): methylated C nucleotide
  modified_base (7)..(7): methylated C nucleotide
  modified_base (9)..(9): methylated C nucleotide
  modified_base (14)..(14): methylated C nucleotide
  modified_base (19)..(19): methylated C nucleotide
  modified_base (21)..(21): methylated C nucleotide
ggggcgcgcggttcgccccgcgcatgggctcc

SEQ ID NO: 1112 - DNA, 30 bp, Artificial Sequence; identical to SEQ ID NO: 876
  Synthetic
  modified_base (3)..(3): methylated C nucleotide
  modified_base (5)..(5): methylated C nucleotide
  modified_base (7)..(7): methylated C nucleotide
  modified_base (12)..(12): methylated C nucleotide
  modified_base (17)..(17): methylated C nucleotide
  modified_base (19)..(19): methylated C nucleotide

SEQ ID NO: 1113 - DNA, 28 bp, Artificial Sequence
  Synthetic
  modified_base (1)..(1): methylated C nucleotide
  modified_base (3)..(3): methylated C nucleotide
  modified_base (5)..(5): methylated C nucleotide
  modified_base (10)..(10): methylated C nucleotide
  modified_base (15)..(15): methylated C nucleotide
  modified_base (17)..(17): methylated C nucleotide
cgcgcggttcgccccgcgcatgggctcc

SEQ ID NO: 1114 - DNA, 26 bp, Artificial Sequence
  Synthetic
  modified_base (1)..(1): methylated C nucleotide
  modified_base (3)..(3): methylated C nucleotide
  modified_base (8)..(8): methylated C nucleotide
  modified_base (13)..(13): methylated C nucleotide
  modified_base (15)..(15): methylated C nucleotide
cgcggttcgccccgcgcatgggctcc

SEQ ID NO: 1115 - DNA, 24 bp, Artificial Sequence
  Synthetic
  modified_base (1)..(1): methylated C nucleotide
  modified_base (6)..(6): methylated C nucleotide
  modified_base (11)..(11): methylated C nucleotide
  modified_base (13)..(13): methylated C nucleotide
cggttcgccccgcgcatgggctcc

SEQ ID NO: 1116 - DNA, 22 bp, Artificial Sequence
  Synthetic
  modified_base (4)..(4): methylated C nucleotide
  modified_base (9)..(9): methylated C nucleotide
  modified_base (11)..(11): methylated C nucleotide
gttcgccccgcgcatgggctcc

SEQ ID NO: 1117 - DNA, 20 bp, Artificial Sequence
  Synthetic
  modified_base (2)..(2): methylated C nucleotide
  modified_base (7)..(7): methylated C nucleotide
  modified_base (9)..(9): methylated C nucleotide
tcgccccgcgcatgggctcc

SEQ ID NO: 1118 - DNA, 18 bp, Artificial Sequence
  Synthetic
  modified_base (5)..(5): methylated C nucleotide
  modified_base (7)..(7): methylated C nucleotide
gccccgcgcatgggctcc

SEQ ID NO: 1119 - DNA, 16 bp, Artificial Sequence
  Synthetic
  modified_base (3)..(3): methylated C nucleotide
  modified_base (5)..(5): methylated C nucleotide
cccgcgcatgggctcc

SEQ ID NO: 1120 - DNA, 15 bp, Artificial Sequence
  Synthetic
  modified_base (3)..(3): methylated C nucleotide
  modified_base (5)..(5): methylated C nucleotide
cccgcgcatgggctc

SEQ ID NO: 1121 - DNA, 38 bp, Artificial Sequence
  Synthetic
  modified_base (13)..(13): methylated C nucleotide
  modified_base (15)..(15): methylated C nucleotide
  modified_base (17)..(17): methylated C nucleotide
  modified_base (22)..(22): methylated C nucleotide
  modified_base (27)..(27): methylated C nucleotide
  modified_base (29)..(29): methylated C nucleotide
cgggggcgggggcgcgcggttcgccccgcgcatgggct

SEQ ID NO: 1122 - DNA, 36 bp, Artificial Sequence
  Synthetic
  modified_base (13)..(13): methylated C nucleotide
  modified_base (15)..(15): methylated C nucleotide
  modified_base (17)..(17): methylated C nucleotide
  modified_base (22)..(22): methylated C nucleotide
  modified_base (27)..(27): methylated C nucleotide
  modified_base (29)..(29): methylated C nucleotide
cgggggcgggggcgcgcggttcgccccgcgcatggg

SEQ ID NO: 1123 - DNA, 34 bp, Artificial Sequence
  Synthetic
  modified_base (13)..(13): methylated C nucleotide
  modified_base (15)..(15): methylated C nucleotide
  modified_base (17)..(17): methylated C nucleotide
  modified_base (22)..(22): methylated C nucleotide
  modified_base (27)..(27): methylated C nucleotide
  modified_base (29)..(29): methylated C nucleotide
cgggggcgggggcgcgcggttcgccccgcgcatg

SEQ ID NO: 1124 - DNA, 32 bp, Artificial Sequence
  Synthetic
  modified_base (13)..(13): methylated C nucleotide
  modified_base (15)..(15): methylated C nucleotide
  modified_base (17)..(17): methylated C nucleotide
  modified_base (22)..(22): methylated C nucleotide
  modified_base (27)..(27): methylated C nucleotide
  modified_base (29)..(29): methylated C nucleotide
cgggggcgggggcgcgcggttcgccccgcgca

SEQ ID NO: 1125 - DNA, 30 bp, Artificial Sequence
  Synthetic
  modified_base (13)..(13): methylated C nucleotide
  modified_base (15)..(15): methylated C nucleotide
  modified_base (17)..(17): methylated C nucleotide
  modified_base (22)..(22): methylated C nucleotide
  modified_base (27)..(27): methylated C nucleotide
  modified_base (29)..(29): methylated C nucleotide
cgggggcgggggcgcgcggttcgccccgcg

SEQ ID NO: 1126 - DNA, 28 bp, Artificial Sequence
  Synthetic
  modified_base (13)..(13): methylated C nucleotide
  modified_base (15)..(15): methylated C nucleotide
  modified_base (17)..(17): methylated C nucleotide
  modified_base (22)..(22): methylated C nucleotide
  modified_base (27)..(27): methylated C nucleotide
cgggggcgggggcgcgcggttcgccccg

SEQ ID NO: 1127 - DNA, 26 bp, Artificial Sequence
  Synthetic
  modified_base (13)..(13): methylated C nucleotide
  modified_base (15)..(15): methylated C nucleotide
  modified_base (17)..(17): methylated C nucleotide
  modified_base (22)..(22): methylated C nucleotide
cgggggcgggggcgcgcggttcgccc

SEQ ID NO: 1128 - DNA, 24 bp, Artificial Sequence
  Synthetic
  modified_base (13)..(13): methylated C nucleotide
  modified_base (15)..(15): methylated C nucleotide
  modified_base (17)..(17): methylated C nucleotide
  modified_base (22)..(22): methylated C nucleotide
cgggggcgggggcgcgcggttcgc

SEQ ID NO: 1129 - DNA, 22 bp, Artificial Sequence
  Synthetic
  modified_base (13)..(13): methylated C nucleotide
  modified_base (15)..(15): methylated C nucleotide
  modified_base (17)..(17): methylated C nucleotide
  modified_base (22)..(22): methylated C nucleotide
cgggggcgggggcgcgcggttc

SEQ ID NO: 1130 - DNA, 20 bp, Artificial Sequence
  Synthetic
  modified_base (13)..(13): methylated C nucleotide
  modified_base (15)..(15): methylated C nucleotide
  modified_base (17)..(17): methylated C nucleotide
cgggggcgggggcgcgcggt

SEQ ID NO: 1131 - DNA, 18 bp, Artificial Sequence
  Synthetic
  modified_base (13)..(13): methylated C nucleotide
  modified_base (15)..(15): methylated C nucleotide
  modified_base (17)..(17): methylated C nucleotide
cgggggcgggggcgcgcg

SEQ ID NO: 1132 - DNA, 16 bp, Artificial Sequence
  Synthetic
  modified_base (13)..(13): methylated C nucleotide
  modified_base (15)..(15): methylated C nucleotide
cgggggcgggggcgcg

SEQ ID NO: 1133 - DNA, 15 bp, Artificial Sequence
  Synthetic
  modified_base (13)..(13): methylated C nucleotide
  modified_base (15)..(15): methylated C nucleotide
cgggggcgggggcgc

SEQ ID NO: 1134 - DNA, 40 bp, Artificial Sequence
  Synthetic
  modified_base (13)..(13): methylated C nucleotide
  modified_base (15)..(15): methylated C nucleotide
  modified_base (17)..(17): methylated C nucleotide
  modified_base (22)..(22): methylated C nucleotide
  modified_base (27)..(27): methylated C nucleotide
  modified_base (29)..(29): methylated C nucleotide
cgggggcaggggcgcgcggttcgccccgcgcatgggctcc

SEQ ID NO: 1135 - DNA, 40 bp, Artificial Sequence
  Synthetic
  modified_base (13)..(13): methylated C nucleotide
  modified_base (15)..(15): methylated C nucleotide
  modified_base (17)..(17): methylated C nucleotide
  modified_base (22)..(22): methylated C nucleotide
  modified_base (27)..(27): methylated C nucleotide
  modified_base (29)..(29): methylated C nucleotide
cgggggcgggggcgcgcgtttcgccccgcgcatgggctcc

SEQ ID NO: 1136 - DNA, 40 bp, Artificial Sequence
  Synthetic
  modified_base (13)..(13): methylated C nucleotide
  modified_base (15)..(15): methylated C nucleotide
  modified_base (17)..(17): methylated C nucleotide
  modified_base (22)..(22): methylated C nucleotide
  modified_base (27)..(27): methylated C nucleotide
  modified_base (29)..(29): methylated C nucleotide
cgggggcgggggcgcgcggttcgccccgcacatgggctcc

SEQ ID NO: 1137 - DNA, 20 bp, Artificial Sequence
  Synthetic
  modified_base (3)..(3): methylated C nucleotide
  modified_base (5)..(5): methylated C nucleotide
  modified_base (7)..(7): methylated C nucleotide
  modified_base (12)..(12): methylated C nucleotide
  modified_base (17)..(17): methylated C nucleotide
  modified_base (19)..(19): methylated C nucleotide
ggcgcgcggttcgccccgcg

SEQ ID NO: 1138 - DNA, 21 bp, Artificial Sequence
  Synthetic
  modified_base (4)..(4): methylated C nucleotide
  modified_base (6)..(6): methylated C nucleotide
  modified_base (8)..(8): methylated C nucleotide
  modified_base (13)..(13): methylated C nucleotide
  modified_base (18)..(18): methylated C nucleotide
  modified_base (20)..(20): methylated C nucleotide
gggcgcgcggttcgccccgcg

SEQ ID NO: 1139 - DNA, 22 bp, Artificial Sequence
  Synthetic
  modified_base (5)..(5): methylated C nucleotide
  modified_base (7)..(7): methylated C nucleotide
  modified_base (9)..(9): methylated C nucleotide
  modified_base (14)..(14): methylated C nucleotide
  modified_base (19)..(19): methylated C nucleotide
  modified_base (21)..(21): methylated C nucleotide
ggggcgcgcggttcgccccgcg

SEQ ID NO: 1140 - DNA, 23 bp, Artificial Sequence
  Synthetic
  modified_base (6)..(6): methylated C nucleotide
  modified_base (8)..(8): methylated C nucleotide
  modified_base (10)..(10): methylated C nucleotide
  modified_base (15)..(15): methylated C nucleotide
  modified_base (20)..(20): methylated C nucleotide
  modified_base (22)..(22): methylated C nucleotide
gggggcgcgcggttcgccccgcg

SEQ ID NO: 1141 - DNA, 24 bp, Artificial Sequence
  Synthetic
  modified_base (7)..(7): methylated C nucleotide
  modified_base (9)..(9): methylated C nucleotide
  modified_base (11)..(11): methylated C nucleotide
  modified_base (16)..(16): methylated C nucleotide
  modified_base (21)..(21): methylated C nucleotide
  modified_base (23)..(23): methylated C nucleotide
cgggggcgcgcggttcgccccgcg

SEQ ID NO: 1142 - DNA, 25 bp, Artificial Sequence
  Synthetic
  modified_base (8)..(8): methylated C nucleotide
  modified_base (10)..(10): methylated C nucleotide
  modified_base (12)..(12): methylated C nucleotide
  modified_base (17)..(17): methylated C nucleotide
  modified_base (22)..(22): methylated C nucleotide
  modified_base (24)..(24): methylated C nucleotide
gcgggggcgcgcggttcgccccgcg

SEQ ID NO: 1143 - DNA, 21 bp, Artificial Sequence
  Synthetic
  modified_base (3)..(3): methylated C nucleotide
  modified_base (5)..(5): methylated C nucleotide
  modified_base (7)..(7): methylated C nucleotide
  modified_base (12)..(12): methylated C nucleotide
  modified_base (17)..(17): methylated C nucleotide
  modified_base (19)..(19): methylated C nucleotide
ggcgcgcggttcgccccgcgc

SEQ ID NO: 1144 - DNA, 22 bp, Artificial Sequence
  Synthetic
  modified_base (3)..(3): methylated C nucleotide
  modified_base (5)..(5): methylated C nucleotide
  modified_base (7)..(7): methylated C nucleotide
  modified_base (12)..(12): methylated C nucleotide
  modified_base (17)..(17): methylated C nucleotide
  modified_base (19)..(19): methylated C nucleotide
ggcgcgcggttcgccccgcgca

SEQ ID NO: 1145 - DNA, 23 bp, Artificial Sequence
  Synthetic
  modified_base (3)..(3): methylated C nucleotide
  modified_base (5)..(5): methylated C nucleotide
  modified_base (7)..(7): methylated C nucleotide
  modified_base (12)..(12): methylated C nucleotide
  modified_base (17)..(17): methylated C nucleotide
  modified_base (19)..(19): methylated C nucleotide
ggcgcgcggttcgccccgcgcat

SEQ ID NO: 1146 - DNA, 24 bp, Artificial Sequence
  Synthetic
  modified_base (3)..(3): methylated C nucleotide
  modified_base (5)..(5): methylated C nucleotide
  modified_base (7)..(7): methylated C nucleotide
  modified_base (12)..(12): methylated C nucleotide
  modified_base (17)..(17): methylated C nucleotide
  modified_base (19)..(19): methylated C nucleotide
ggcgcgcggttcgccccgcgcatg

SEQ ID NO: 1147 - DNA, 25 bp, Artificial Sequence
  Synthetic
  modified_base (3)..(3): methylated C nucleotide
  modified_base (5)..(5): methylated C nucleotide
  modified_base (7)..(7): methylated C nucleotide
  modified_base (12)..(12): methylated C nucleotide
  modified_base (17)..(17): methylated C nucleotide
  modified_base (19)..(19): methylated C nucleotide
ggcgcgcggttcgccccgcgcatgg

SEQ ID NO: 1148 - DNA, 22 bp, Artificial Sequence
  Synthetic
  modified_base (4)..(4): methylated C nucleotide
  modified_base (6)..(6): methylated C nucleotide
  modified_base (8)..(8): methylated C nucleotide
  modified_base (13)..(13): methylated C nucleotide
  modified_base (18)..(18): methylated C nucleotide
  modified_base (20)..(20): methylated C nucleotide
gggcgcgcggttcgccccgcgc

SEQ ID NO: 1149 - DNA, 24 bp, Artificial Sequence
  Synthetic
  modified_base (5)..(5): methylated C nucleotide
  modified_base (7)..(7): methylated C nucleotide
  modified_base (9)..(9): methylated C nucleotide
  modified_base (14)..(14): methylated C nucleotide
  modified_base (19)..(19): methylated C nucleotide
  modified_base (21)..(21): methylated C nucleotide
ggggcgcgcggttcgccccgcgca

SEQ ID NO: 1150 - DNA, 26 bp, Artificial Sequence
  Synthetic
  modified_base (6)..(6): methylated C nucleotide
  modified_base (8)..(8): methylated C nucleotide
  modified_base (10)..(10): methylated C nucleotide
  modified_base (15)..(15): methylated C nucleotide
  modified_base (20)..(20): methylated C nucleotide
  modified_base (22)..(22): methylated C nucleotide
gggggcgcgcggttcgccccgcgcat

SEQ ID NO: 1151 - DNA, 28 bp, Artificial Sequence
  Synthetic
  modified_base (7)..(7): methylated C nucleotide
  modified_base (9)..(9): methylated C nucleotide
  modified_base (11)..(11): methylated C nucleotide
  modified_base (16)..(16): methylated C nucleotide
  modified_base (21)..(21): methylated C nucleotide
  modified_base (23)..(23): methylated C nucleotide
cgggggcgcgcggttcgccccgcgcatg

SEQ ID NO: 1152 - DNA, 30 bp, Artificial Sequence
  Synthetic
  modified_base (8)..(8): methylated C nucleotide
  modified_base (10)..(10): methylated C nucleotide
  modified_base (12)..(12): methylated C nucleotide
  modified_base (17)..(17): methylated C nucleotide
  modified_base (22)..(22): methylated C nucleotide
  modified_base (24)..(24): methylated C nucleotide
gcgggggcgcgcggttcgccccgcgcatgg

SEQ ID NO: 1153 - DNA, 20 bp, Artificial Sequence
  Synthetic
  modified_base (6)..(6): methylated C nucleotide
  modified_base (8)..(8): methylated C nucleotide
  modified_base (10)..(10): methylated C nucleotide
  modified_base (15)..(15): methylated C nucleotide
  modified_base (20)..(20): methylated C nucleotide
gggggcgcgcggttcgcccc

SEQ ID NO: 1154 - DNA, 20 bp, Artificial Sequence
  Synthetic
  modified_base (9)..(9): methylated C nucleotide
  modified_base (11)..(11): methylated C nucleotide
  modified_base (13)..(13): methylated C nucleotide
  modified_base (18)..(18): methylated C nucleotide
ggcgggggcgcgcggttcgc

SEQ ID NO: 1155 - DNA, 20 bp, Artificial Sequence
  Synthetic
  modified_base (12)..(12): methylated C nucleotide
  modified_base (14)..(14): methylated C nucleotide
  modified_base (16)..(16): methylated C nucleotide
gggggcgggggcgcgcggtt

SEQ ID NO: 1156 - DNA, 20 bp, Artificial Sequence
  Synthetic
  modified_base (15)..(15): methylated C nucleotide
  modified_base (17)..(17): methylated C nucleotide
  modified_base (19)..(19): methylated C nucleotide
ggcgggggcgggggcgcgcg

SEQ ID NO: 1157 - DNA, 20 bp, Artificial Sequence
  Synthetic
  modified_base (18)..(18): methylated C nucleotide
  modified_base (20)..(20): methylated C nucleotide
cggggcgggggcgggggcgc

SEQ ID NO: 1158 - DNA, 20 bp, Artificial Sequence
  Synthetic
  modified_base (2)..(2): methylated C nucleotide
  modified_base (4)..(4): methylated C nucleotide
  modified_base (9)..(9): methylated C nucleotide
  modified_base (14)..(14): methylated C nucleotide
  modified_base (16)..(16): methylated C nucleotide
gcgcggttcgccccgcgcat

SEQ ID NO: 1159 - DNA, 20 bp, Artificial Sequence
  Synthetic
  modified_base (1)..(1): methylated C nucleotide
  modified_base (6)..(6): methylated C nucleotide
  modified_base (11)..(11): methylated C nucleotide
  modified_base (13)..(13): methylated C nucleotide
cggttcgccccgcgcatggg

SEQ ID NO: 1160 - DNA, 20 bp, Artificial Sequence
  Synthetic
  modified_base (3)..(3): methylated C nucleotide
  modified_base (8)..(8): methylated C nucleotide
  modified_base (10)..(10): methylated C nucleotide
ttcgccccgcgcatgggctc

SEQ ID NO: 1161 - DNA, 20 bp, Artificial Sequence
  Synthetic
  modified_base (5)..(5): methylated C nucleotide
  modified_base (7)..(7): methylated C nucleotide
gccccgcgcatgggctccgt

SEQ ID NO: 1162 - DNA, 20 bp, Artificial Sequence
  Synthetic
  modified_base (2)..(2): methylated C nucleotide
  modified_base (4)..(4): methylated C nucleotide
ccgcgcatgggctccgtccg

SEQ ID NO: 1163 - DNA, 18 bp, Artificial Sequence
  Synthetic
  modified_base (1)..(1): methylated C nucleotide
  modified_base (3)..(3): methylated C nucleotide
  modified_base (5)..(5): methylated C nucleotide
  modified_base (10)..(10): methylated C nucleotide
  modified_base (15)..(15): methylated C nucleotide
  modified_base (17)..(17): methylated C nucleotide
cgcgcggttcgccccgcg

SEQ ID NO: 1164 - DNA, 16 bp, Artificial Sequence
  Synthetic
  modified_base (1)..(1): methylated C nucleotide
  modified_base (3)..(3): methylated C nucleotide
  modified_base (8)..(8): methylated C nucleotide
  modified_base (13)..(13): methylated C nucleotide
  modified_base (15)..(15): methylated C nucleotide
cgcggttcgccccgcg

SEQ ID NO: 1165 - DNA, 15 bp, Artificial Sequence
  Synthetic
  modified_base (2)..(2): methylated C nucleotide
  modified_base (7)..(7): methylated C nucleotide
  modified_base (12)..(12): methylated C nucleotide
  modified_base (14)..(14): methylated C nucleotide
gcggttcgccccgcg

SEQ ID NO: 1166 - DNA, 18 bp, Artificial Sequence
  Synthetic
  modified_base (3)..(3): methylated C nucleotide
  modified_base (5)..(5): methylated C nucleotide
  modified_base (7)..(7): methylated C nucleotide
  modified_base (12)..(12): methylated C nucleotide
  modified_base (17)..(17): methylated C nucleotide
ggcgcgcggttcgccccg

SEQ ID NO: 1167 - DNA, 16 bp, Artificial Sequence
  Synthetic
  modified_base (3)..(3): methylated C nucleotide
  modified_base (5)..(5): methylated C nucleotide
  modified_base (7)..(7): methylated C nucleotide
  modified_base (12)..(12): methylated C nucleotide
ggcgcgcggttcgccc

SEQ ID NO: 1168 - DNA, 15 bp, Artificial Sequence
  Synthetic
  modified_base (3)..(3): methylated C nucleotide
  modified_base (5)..(5): methylated C nucleotide
  modified_base (7)..(7): methylated C nucleotide
  modified_base (12)..(12): methylated C nucleotide
ggcgcgcggttcgcc

SEQ ID NO: 1169 - DNA, 20 bp, Artificial Sequence
  Synthetic
  modified_base (3)..(3): methylated C nucleotide
  modified_base (5)..(5): methylated C nucleotide
  modified_base (7)..(7): methylated C nucleotide
  modified_base (12)..(12): methylated C nucleotide
  modified_base (17)..(17): methylated C nucleotide
  modified_base (19)..(19): methylated C nucleotide
ggcgcacggttcgccccgcg

SEQ ID NO: 1170 - DNA, 20 bp, Artificial Sequence
  Synthetic
  modified_base (3)..(3): methylated C nucleotide
  modified_base (5)..(5): methylated C nucleotide
  modified_base (7)..(7): methylated C nucleotide
  modified_base (12)..(12): methylated C nucleotide
  modified_base (17)..(17): methylated C nucleotide
  modified_base (19)..(19): methylated C nucleotide
ggcgcgcggttcgtcccgcg

SEQ ID NO: 1171 - DNA, 20 bp, Artificial Sequence
  Synthetic
  modified_base (3)..(3): methylated C nucleotide
  modified_base (5)..(5): methylated C nucleotide
  modified_base (7)..(7): methylated C nucleotide
  modified_base (12)..(12): methylated C nucleotide
  modified_base (17)..(17): methylated C nucleotide
  modified_base (19)..(19): methylated C nucleotide
ggcgcgcggttcgccgcgcg

SEQ ID NO: 1172 - DNA, 26 bp, Artificial Sequence
  Synthetic
ggcgcgcggttcgccccgcgcatggg

SEQ ID NO: 1173 - DNA, 27 bp, Artificial Sequence
  Synthetic
gggcgcgcggttcgccccgcgcatggg

SEQ ID NO: 1174 - DNA, 28 bp, Artificial Sequence
  Synthetic
ggggcgcgcggttcgccccgcgcatggg

SEQ ID NO: 1175 - DNA, 29 bp, Artificial Sequence
  Synthetic
gggggcgcgcggttcgccccgcgcatggg

SEQ ID NO: 1176 - DNA, 30 bp, Artificial Sequence; identical to SEQ ID NO: 871
  Synthetic

SEQ ID NO: 1177 - DNA, 31 bp, Artificial Sequence; identical to SEQ ID NO: 872
  Synthetic

SEQ ID NO: 1178 - DNA, 27 bp, Artificial Sequence
  Synthetic
ggcgcgcggttcgccccgcgcatgggc

SEQ ID NO: 1179 - DNA, 28 bp, Artificial Sequence
  Synthetic
ggcgcgcggttcgccccgcgcatgggct

SEQ ID NO: 1180 - DNA, 29 bp, Artificial Sequence
  Synthetic
ggcgcgcggttcgccccgcgcatgggctc

SEQ ID NO: 1181 - DNA, 30 bp, Artificial Sequence; identical to SEQ ID NO: 876
  Synthetic

SEQ ID NO: 1182 - DNA, 31 bp, Artificial Sequence; identical to SEQ ID NO: 877
  Synthetic

SEQ ID NO: 1183 - DNA, 28 bp, Artificial Sequence
  Synthetic
gggcgcgcggttcgccccgcgcatgggc

SEQ ID NO: 1184 - DNA, 30 bp, Artificial Sequence; identical to SEQ ID NO: 879
  Synthetic

SEQ ID NO: 1185 - DNA, 32 bp, Artificial Sequence; identical to SEQ ID NO: 880
  Synthetic

SEQ ID NO: 1186 - DNA, 34 bp, Artificial Sequence; identical to SEQ ID NO: 881
  Synthetic

SEQ ID NO: 1187 - DNA, 36 bp, Artificial Sequence; identical to SEQ ID NO: 882
  Synthetic

SEQ ID NO: 1188 - DNA, 26 bp, Artificial Sequence
  Synthetic
gggggcgcgcggttcgccccgcgcat

SEQ ID NO: 1189 - DNA, 26 bp, Artificial Sequence
  Synthetic
ggcgggggcgcgcggttcgccccgcg

SEQ ID NO: 1190 - DNA, 26 bp, Artificial Sequence
  Synthetic
gggggcgggggcgcgcggttcgcccc

SEQ ID NO: 1191 - DNA, 26 bp, Artificial Sequence
  Synthetic
ggcgggggcgggggcgcgcggttcgc

SEQ ID NO: 1192 - DNA, 26 bp, Artificial Sequence
  Synthetic
cggggcgggggcgggggcgcgcggtt

SEQ ID NO: 1193 - DNA, 26 bp, Artificial Sequence
  Synthetic
gcgcggttcgccccgcgcatgggctc

SEQ ID NO: 1194 - DNA, 26 bp, Artificial Sequence
  Synthetic
cggttcgccccgcgcatgggctccgt

SEQ ID NO: 1195 - DNA, 26 bp, Artificial Sequence
  Synthetic
ttcgccccgcgcatgggctccgtccg

SEQ ID NO: 1196 - DNA, 26 bp, Artificial Sequence
  Synthetic
gccccgcgcatgggctccgtccgcgg

SEQ ID NO: 1197 - DNA, 26 bp, Artificial Sequence
  Synthetic
ccgcgcatgggctccgtccgcgggcc

SEQ ID NO: 1198 - DNA, 24 bp, Artificial Sequence
  Synthetic
cgcgcggttcgccccgcgcatggg

SEQ ID NO: 1199 - DNA, 22 bp, Artificial Sequence
  Synthetic
cgcggttcgccccgcgcatggg

SEQ ID NO: 1200 - DNA, 20 bp, Artificial Sequence
  Synthetic
cggttcgccccgcgcatggg

SEQ ID NO: 1201 - DNA, 18 bp, Artificial Sequence
  Synthetic
gttcgccccgcgcatggg

SEQ ID NO: 1202 - DNA, 16 bp, Artificial Sequence
  Synthetic
tcgccccgcgcatggg

SEQ ID NO: 1203 - DNA, 15 bp, Artificial Sequence
  Synthetic
cgccccgcgcatggg

SEQ ID NO: 1204 - DNA, 24 bp, Artificial Sequence
  Synthetic
ggcgcgcggttcgccccgcgcatg

SEQ ID NO: 1205 - DNA, 22 bp, Artificial Sequence
  Synthetic
ggcgcgcggttcgccccgcgca

SEQ ID NO: 1206 - DNA, 20 bp, Artificial Sequence
  Synthetic
ggcgcgcggttcgccccgcg

SEQ ID NO: 1207 - DNA, 18 bp, Artificial Sequence
  Synthetic
ggcgcgcggttcgccccg

SEQ ID NO: 1208 - DNA, 16 bp, Artificial Sequence
  Synthetic
ggcgcgcggttcgccc

SEQ ID NO: 1209 - DNA, 15 bp, Artificial Sequence
  Synthetic
ggcgcgcggttcgcc

SEQ ID NO: 1210 - DNA, 26 bp, Artificial Sequence
  Synthetic
ggcgcgctgttcgccccgcgcatggg

SEQ ID NO: 1211 - DNA, 26 bp, Artificial Sequence
  Synthetic
ggcgcgcggttcgccccgcgcctggg

SEQ ID NO: 1212 - DNA, 26 bp, Artificial Sequence
  Synthetic
ggcgcgcggttcgacccgcgcatggg

SEQ ID NO: 1213 - DNA, 31 bp, Artificial Sequence; identical to SEQ ID NO: 78
  Synthetic
  modified_base (3)..(3): methylated C nucleotide
  modified_base (7)..(7): methylated C nucleotide
  modified_base (19)..(19): methylated C nucleotide

SEQ ID NO: 1214 - DNA, 32 bp, Artificial Sequence
  Synthetic
  modified_base (4)..(4): methylated C nucleotide
  modified_base (8)..(8): methylated C nucleotide
  modified_base (20)..(20): methylated C nucleotide
cagcgtgcgggagggctgtcgcctcgccccca

SEQ ID NO: 1215 - DNA, 33 bp, Artificial Sequence
  Synthetic
  modified_base (5)..(5): methylated C nucleotide
  modified_base (7)..(7): methylated C nucleotide
  modified_base (9)..(9): methylated C nucleotide
  modified_base (21)..(21): methylated C nucleotide
ccagcgtgcgggagggctgtcgcctcgccccca

SEQ ID NO: 1216 - DNA, 34 bp, Artificial Sequence
  Synthetic
  modified_base (6)..(6): methylated C nucleotide
  modified_base (10)..(10): methylated C nucleotide
  modified_base (22)..(22): methylated C nucleotide
cccagcgtgcgggagggctgtcgcctcgccccca

SEQ ID NO: 1217 - DNA, 35 bp, Artificial Sequence
  Synthetic
  modified_base (7)..(7): methylated C nucleotide
  modified_base (11)..(11): methylated C nucleotide
  modified_base (23)..(23): methylated C nucleotide
acccagcgtgcgggagggctgtcgcctcgccccca

SEQ ID NO: 1218 - DNA, 36 bp, Artificial Sequence
  Synthetic
  modified_base (8)..(8): methylated C nucleotide
  modified_base (12)..(12): methylated C nucleotide
  modified_base (24)..(24): methylated C nucleotide
aacccagcgtgcgggagggctgtcgcctcgccccca

SEQ ID NO: 1219 - DNA, 32 bp, Artificial Sequence
  Synthetic
  modified_base (3)..(3): methylated C nucleotide
  modified_base (7)..(7): methylated C nucleotide
  modified_base (19)..(19): methylated C nucleotide
agcgtgcgggagggctgtcgcctcgcccccac

SEQ ID NO: 1220 - DNA, 33 bp, Artificial Sequence
  Synthetic
  modified_base (3)..(3): methylated C nucleotide
  modified_base (7)..(7): methylated C nucleotide
  modified_base (19)..(19): methylated C nucleotide
agcgtgcgggagggctgtcgcctcgcccccact

SEQ ID NO: 1221 - DNA, 34 bp, Artificial Sequence
  Synthetic
  modified_base (3)..(3): methylated C nucleotide
  modified_base (7)..(7): methylated C nucleotide
  modified_base (19)..(19): methylated C nucleotide
agcgtgcgggagggctgtcgcctcgcccccactt

SEQ ID NO: 1222 - DNA, 35 bp, Artificial Sequence
  Synthetic
  modified_base (3)..(3): methylated C nucleotide
  modified_base (7)..(7): methylated C nucleotide
  modified_base (19)..(19): methylated C nucleotide
agcgtgcgggagggctgtcgcctcgcccccacttg

SEQ ID NO: 1223 - DNA, 36 bp, Artificial Sequence
  Synthetic
  modified_base (3)..(3): methylated C nucleotide
  modified_base (7)..(7): methylated C nucleotide
  modified_base (19)..(19): methylated C nucleotide
agcgtgcgggagggctgtcgcctcgcccccacttgc

SEQ ID NO: 1224 - DNA, 33 bp, Artificial Sequence
  Synthetic
  modified_base (4)..(4): methylated C nucleotide
  modified_base (8)..(8): methylated C nucleotide
  modified_base (20)..(20): methylated C nucleotide
cagcgtgcgggagggctgtcgcctcgcccccac

SEQ ID NO: 1225 - DNA, 35 bp, Artificial Sequence
  Synthetic
  modified_base (5)..(5): methylated C nucleotide
  modified_base (9)..(9): methylated C nucleotide
  modified_base (21)..(21): methylated C nucleotide
ccagcgtgcgggagggctgtcgcctcgcccccact

SEQ ID NO: 1226 - DNA, 37 bp, Artificial Sequence
  Synthetic
  modified_base (6)..(6): methylated C nucleotide
  modified_base (10)..(10): methylated C nucleotide
  modified_base (22)..(22): methylated C nucleotide
cccagcgtgcgggagggctgtcgcctcgcccccactt

SEQ ID NO: 1227 - DNA, 39 bp, Artificial Sequence
  Synthetic
  modified_base (7)..(7): methylated C nucleotide
  modified_base (11)..(11): methylated C nucleotide
  modified_base (23)..(23): methylated C nucleotide
acccagcgtgcgggagggctgtcgcctcgcccccacttg

SEQ ID NO: 1228 - DNA, 41 bp, Artificial Sequence
  Synthetic
  modified_base (8)..(8): methylated C nucleotide
  modified_base (12)..(12): methylated C nucleotide
  modified_base (24)..(24): methylated C nucleotide
aacccagcgtgcgggagggctgtcgcctcgcccccacttgc

SEQ ID NO: 1229 - DNA, 31 bp, Artificial Sequence
  Synthetic
  modified_base (6)..(6): methylated C nucleotide
  modified_base (10)..(10): methylated C nucleotide
  modified_base (22)..(22): methylated C nucleotide
cccagcgtgcgggagggctgtcgcctcgccc

SEQ ID NO: 1230 - DNA, 31 bp, Artificial Sequence
  Synthetic
  modified_base (9)..(9): methylated C nucleotide
  modified_base (13)..(13): methylated C nucleotide
  modified_base (25)..(25): methylated C nucleotide
caacccagcgtgcgggagggctgtcgcctcg

SEQ ID NO: 1231 - DNA, 31 bp, Artificial Sequence
  Synthetic
  modified_base (12)..(12): methylated C nucleotide
  modified_base (16)..(16): methylated C nucleotide
  modified_base (28)..(28): methylated C nucleotide
ctgcaacccagcgtgcgggagggctgtcgcc

SEQ ID NO: 1232 - DNA, 31 bp, Artificial Sequence
  Synthetic
  modified_base (15)..(15): methylated C nucleotide
  modified_base (19)..(19): methylated C nucleotide
  modified_base (31)..(31): methylated C nucleotide
cagctgcaacccagcgtgcgggagggctgtc

SEQ ID NO: 1233 - DNA, 31 bp, Artificial Sequence
  Synthetic
  modified_base (18)..(18): methylated C nucleotide
  modified_base (22)..(22): methylated C nucleotide
gtgcagctgcaacccagcgtgcgggagggct

SEQ ID NO: 1234 - DNA, 31 bp, Artificial Sequence
  Synthetic
  modified_base (4)..(4): methylated C nucleotide
  modified_base (16)..(16): methylated C nucleotide
gtgcgggagggctgtcgcctcgcccccactt

SEQ ID NO: 1235 - DNA, 31 bp, Artificial Sequence
  Synthetic
  modified_base (1)..(1): methylated C nucleotide
  modified_base (13)..(13): methylated C nucleotide
cgggagggctgtcgcctcgcccccacttgct

SEQ ID NO: 1236 - DNA, 31 bp, Artificial Sequence
  Synthetic
  modified_base (10)..(10): methylated C nucleotide
gagggctgtcgcctcgcccccacttgctctt

SEQ ID NO: 1237 - DNA, 31 bp, Artificial Sequence
  Synthetic
  modified_base (7)..(7): methylated C nucleotide
ggctgtcgcctcgcccccacttgctcttaat

SEQ ID NO: 1238 - DNA, 31 bp, Artificial Sequence
  Synthetic
  modified_base (4)..(4): methylated C nucleotide
tgtcgcctcgcccccacttgctcttaatgac

SEQ ID NO: 1239 - DNA, 29 bp, Artificial Sequence
  Synthetic
  modified_base (1)..(1): methylated C nucleotide
  modified_base (5)..(5): methylated C nucleotide
  modified_base (17)..(17): methylated C nucleotide
cgtgcgggagggctgtcgcctcgccccca

SEQ ID NO: 1240 - DNA, 27 bp, Artificial Sequence
  Synthetic
  modified_base (3)..(3): methylated C nucleotide
  modified_base (15)..(15): methylated C nucleotide
tgcgggagggctgtcgcctcgccccca

SEQ ID NO: 1241 - DNA, 25 bp, Artificial Sequence
  Synthetic
  modified_base (1)..(1): methylated C nucleotide
  modified_base (13)..(13): methylated C nucleotide
cgggagggctgtcgcctcgccccca

SEQ ID NO: 1242 - DNA, 23 bp, Artificial Sequence
  Synthetic
  modified_base (11)..(11): methylated C nucleotide
ggagggctgtcgcctcgccccca

SEQ ID NO: 1243 - DNA, 21 bp, Artificial Sequence
  Synthetic
  modified_base (9)..(9): methylated C nucleotide
agggctgtcgcctcgccccca

SEQ ID NO: 1244 - DNA, 19 bp, Artificial Sequence
  Synthetic
  modified_base (7)..(7): methylated C nucleotide
ggctgtcgcctcgccccca

SEQ ID NO: 1245 - DNA, 17 bp, Artificial Sequence
  Synthetic
  modified_base (5)..(5): methylated C nucleotide
ctgtcgcctcgccccca

SEQ ID NO: 1246 - DNA, 15 bp, Artificial Sequence
  Synthetic
  modified_base (3)..(3): methylated C nucleotide
gtcgcctcgccccca

SEQ ID NO: 1247 - DNA, 29 bp, Artificial Sequence
  Synthetic
  modified_base (3)..(3): methylated C nucleotide
  modified_base (7)..(7): methylated C nucleotide
  modified_base (19)..(19): methylated C nucleotide
agcgtgcgggagggctgtcgcctcgcccc

SEQ ID NO: 1248 - DNA, 27 bp, Artificial Sequence
  Synthetic
  modified_base (3)..(3): methylated C nucleotide
  modified_base (7)..(7): methylated C nucleotide
  modified_base (19)..(19): methylated C nucleotide
agcgtgcgggagggctgtcgcctcgcc

SEQ ID NO: 1249 - DNA, 25 bp, Artificial Sequence
  Synthetic
  modified_base (3)..(3): methylated C nucleotide
  modified_base (7)..(7): methylated C nucleotide
  modified_base (19)..(19): methylated C nucleotide
agcgtgcgggagggctgtcgcctcg

SEQ ID NO: 1250 - DNA, 23 bp, Artificial Sequence
  Synthetic
  modified_base (3)..(3): methylated C nucleotide
  modified_base (7)..(7): methylated C nucleotide
  modified_base (19)..(19): methylated C nucleotide
agcgtgcgggagggctgtcgcct

SEQ ID NO: 1251 - DNA, 21 bp, Artificial Sequence
  Synthetic
  modified_base (3)..(3): methylated C nucleotide
  modified_base (7)..(7): methylated C nucleotide
  modified_base (19)..(19): methylated C nucleotide
agcgtgcgggagggctgtcgc

SEQ ID NO: 1252 - DNA, 19 bp, Artificial Sequence
  Synthetic
  modified_base (3)..(3): methylated C nucleotide
  modified_base (7)..(7): methylated C nucleotide
  modified_base (19)..(19): methylated C nucleotide
agcgtgcgggagggctgtc

SEQ ID NO: 1253 - DNA, 17 bp, Artificial Sequence
  Synthetic
  modified_base (3)..(3): methylated C nucleotide
  modified_base (7)..(7): methylated C nucleotide
agcgtgcgggagggctg

SEQ ID NO: 1254 - DNA, 15 bp, Artificial Sequence
  Synthetic
  modified_base (3)..(3): methylated C nucleotide
  modified_base (7)..(7): methylated C nucleotide
agcgtgcgggagggc

SEQ ID NO: 1255 - DNA, 31 bp, Artificial Sequence
  Synthetic
  modified_base (3)..(3): methylated C nucleotide
  modified_base (7)..(7): methylated C nucleotide
  modified_base (19)..(19): methylated C nucleotide
agcgagcgggagggctgtcgcctcgccccca

SEQ ID NO: 1256 - DNA, 31 bp, Artificial Sequence
  Synthetic
  modified_base (3)..(3): methylated C nucleotide
  modified_base (7)..(7): methylated C nucleotide
  modified_base (19)..(19): methylated C nucleotide
agcgtgcgggagggatgtcgcctcgccccca

SEQ ID NO: 1257 - DNA, 31 bp, Artificial Sequence
  Synthetic
  modified_base (3)..(3): methylated C nucleotide
  modified_base (7)..(7): methylated C nucleotide
  modified_base (19)..(19): methylated C nucleotide
agcgtgcgggagggctgtcgcgtcgccccca

SEQ ID NO: 1258 - DNA, 26 bp, Artificial Sequence
  Synthetic
  modified_base (2)..(2): methylated C nucleotide
  modified_base (7)..(7): methylated C nucleotide
  modified_base (14)..(14): methylated C nucleotide
  modified_base (18)..(18): methylated C nucleotide
gcggctcgggttgcgggcgcagggca

SEQ ID NO: 1259 - DNA, 27 bp, Artificial Sequence
  Synthetic
  modified_base (3)..(3): methylated C nucleotide
  modified_base (8)..(8): methylated C nucleotide
  modified_base (15)..(15): methylated C nucleotide
  modified_base (19)..(19): methylated C nucleotide
tgcggctcgggttgcgggcgcagggca

SEQ ID NO: 1260 - DNA, 28 bp, Artificial Sequence
  Synthetic
  modified_base (4)..(4): methylated C nucleotide
  modified_base (9)..(9): methylated C nucleotide
  modified_base (16)..(16): methylated C nucleotide
  modified_base (20)..(20): methylated C nucleotide
gtgcggctcgggttgcgggcgcagggca

SEQ ID NO: 1261 - DNA, 29 bp, Artificial Sequence
  Synthetic
  modified_base (5)..(5): methylated C nucleotide
  modified_base (10)..(10): methylated C nucleotide
  modified_base (17)..(17): methylated C nucleotide
  modified_base (21)..(21): methylated C nucleotide
ggtgcggctcgggttgcgggcgcagggca

SEQ ID NO: 1262 - DNA, 30 bp, Artificial Sequence
  Synthetic
  modified_base (6)..(6): methylated C nucleotide
  modified_base (11)..(11): methylated C nucleotide
  modified_base (18)..(18): methylated C nucleotide
  modified_base (22)..(22): methylated C nucleotide
gggtgcggctcgggttgcgggcgcagggca

SEQ ID NO: 1263 - DNA, 31 bp, Artificial Sequence
  Synthetic
  modified_base (7)..(7): methylated C nucleotide
  modified_base (12)..(12): methylated C nucleotide
  modified_base (19)..(19): methylated C nucleotide
  modified_base (23)..(23): methylated C nucleotide
cgggtgcggctcgggttgcgggcgcagggca

SEQ ID NO: 1264 - DNA, 27 bp, Artificial Sequence
  Synthetic
  modified_base (2)..(2): methylated C nucleotide
  modified_base (7)..(7): methylated C nucleotide
  modified_base (14)..(14): methylated C nucleotide
  modified_base (18)..(18): methylated C nucleotide
gcggctcgggttgcgggcgcagggcac

SEQ ID NO: 1265 - DNA, 28 bp, Artificial Sequence
  Synthetic
  modified_base (2)..(2): methylated C nucleotide
  modified_base (7)..(7): methylated C nucleotide
  modified_base (14)..(14): methylated C nucleotide
  modified_base (18)..(18): methylated C nucleotide
gcggctcgggttgcgggcgcagggcacg

SEQ ID NO: 1266 - DNA, 29 bp, Artificial Sequence
  Synthetic
  modified_base (2)..(2): methylated C nucleotide
  modified_base (7)..(7): methylated C nucleotide
  modified_base (14)..(14): methylated C nucleotide
  modified_base (18)..(18): methylated C nucleotide
gcggctcgggttgcgggcgcagggcacgg

SEQ ID NO: 1267 - DNA, 30 bp, Artificial Sequence
  Synthetic
  modified_base (2)..(2): methylated C nucleotide
  modified_base (7)..(7): methylated C nucleotide
  modified_base (14)..(14): methylated C nucleotide
  modified_base (18)..(18): methylated C nucleotide
gcggctcgggttgcgggcgcagggcacggg

SEQ ID NO: 1268 - DNA, 31 bp, Artificial Sequence
  Synthetic
  modified_base (2)..(2): methylated C nucleotide
  modified_base (7)..(7): methylated C nucleotide
  modified_base (14)..(14): methylated C nucleotide
  modified_base (18)..(18): methylated C nucleotide
gcggctcgggttgcgggcgcagggcacgggc

SEQ ID NO: 1269 - DNA, 28 bp, Artificial Sequence
  Synthetic
  modified_base (3)..(3): methylated C nucleotide
  modified_base (8)..(8): methylated C nucleotide
  modified_base (15)..(15): methylated C nucleotide
  modified_base (19)..(19): methylated C nucleotide
tgcggctcgggttgcgggcgcagggcac

SEQ ID NO: 1270 - DNA, 30 bp, Artificial Sequence
  Synthetic
  modified_base (4)..(4): methylated C nucleotide
  modified_base (9)..(9): methylated C nucleotide
  modified_base (16)..(16): methylated C nucleotide
  modified_base (20)..(20): methylated C nucleotide
gtgcggctcgggttgcgggcgcagggcacg

SEQ ID NO: 1271 - DNA, 32 bp, Artificial Sequence
  Synthetic
  modified_base (5)..(5): methylated C nucleotide
  modified_base (10)..(10): methylated C nucleotide
  modified_base (17)..(17): methylated C nucleotide
ggtgcggctcgggttgcgggcgcagggcacgg

SEQ ID NO: 1272 - DNA, 34 bp, Artificial Sequence
  Synthetic
  modified_base (6)..(6): methylated C nucleotide
  modified_base (11)..(11): methylated C nucleotide
  modified_base (18)..(18): methylated C nucleotide
  modified_base (22)..(22): methylated C nucleotide
gggtgcggctcgggttgcgggcgcagggcacggg

SEQ ID NO: 1273 - DNA, 36 bp, Artificial Sequence
  Synthetic
  modified_base (7)..(7): methylated C nucleotide
  modified_base (12)..(12): methylated C nucleotide
  modified_base (19)..(19): methylated C nucleotide
  modified_base (23)..(23): methylated C nucleotide
cgggtgcggctcgggttgcgggcgcagggcacgggc

SEQ ID NO: 1274 - DNA, 26 bp, Artificial Sequence
  Synthetic
  modified_base (5)..(5): methylated C nucleotide
  modified_base (10)..(10): methylated C nucleotide
  modified_base (17)..(17): methylated C nucleotide
  modified_base (21)..(21): methylated C nucleotide
ggtgcggctcgggttgcgggcgcagg

SEQ ID NO: 1275 - DNA, 26 bp, Artificial Sequence
  Synthetic
  modified_base (8)..(8): methylated C nucleotide
  modified_base (13)..(13): methylated C nucleotide
  modified_base (20)..(20): methylated C nucleotide
  modified_base (24)..(24): methylated C nucleotide
gcgggtgcggctcgggttgcgggcgc

SEQ ID NO: 1276 - DNA, 26 bp, Artificial Sequence
  Synthetic
  modified_base (11)..(11): methylated C nucleotide
  modified_base (16)..(16): methylated C nucleotide
  modified_base (23)..(23): methylated C nucleotide
gcggcgggtgcggctcgggttgcggg

SEQ ID NO: 1277 - DNA, 26 bp, Artificial Sequence
  Synthetic
  modified_base (14)..(14): methylated C nucleotide
  modified_base (19)..(19): methylated C nucleotide
  modified_base (26)..(26): methylated C nucleotide
tccgcggcgggtgcggctcgggttgc

SEQ ID NO: 1278 - DNA, 26 bp, Artificial Sequence
  Synthetic
  modified_base (17)..(17): methylated C nucleotide
  modified_base (22)..(22): methylated C nucleotide
ccgtccgcggcgggtgcggctcgggt

SEQ ID NO: 1279 - DNA, 26 bp, Artificial Sequence
  Synthetic
  modified_base (4)..(4): methylated C nucleotide
  modified_base (11)..(11): methylated C nucleotide
  modified_base (15)..(15): methylated C nucleotide
gctcgggttgcgggcgcagggcacgg

SEQ ID NO: 1280 - DNA, 26 bp, Artificial Sequence
  Synthetic
  modified_base (1)..(1): methylated C nucleotide
  modified_base (8)..(8): methylated C nucleotide
  modified_base (12)..(12): methylated C nucleotide
cgggttgcgggcgcagggcacgggcg

SEQ ID NO: 1281 - DNA, 26 bp, Artificial Sequence
  Synthetic
  modified_base (5)..(5): methylated C nucleotide
  modified_base (9)..(9): methylated C nucleotide
gttgcgggcgcagggcacgggcggcg

SEQ ID NO: 1282 - DNA, 26 bp, Artificial Sequence
  Synthetic
  modified_base (2)..(2): methylated C nucleotide
  modified_base (6)..(6): methylated C nucleotide
gcgggcgcagggcacgggcggcggag

SEQ ID NO: 1283 - DNA, 26 bp, Artificial Sequence
  Synthetic
  modified_base (3)..(3): methylated C nucleotide
ggcgcagggcacgggcggcggagact

SEQ ID NO: 1284 - DNA, 24 bp, Artificial Sequence
  Synthetic
  modified_base (5)..(5): methylated C nucleotide
  modified_base (12)..(12): methylated C nucleotide
  modified_base (16)..(16): methylated C nucleotide
ggctcgggttgcgggcgcagggca

SEQ ID NO: 1285 - DNA, 22 bp, Artificial Sequence
  Synthetic
  modified_base (3)..(3): methylated C nucleotide
  modified_base (10)..(10): methylated C nucleotide
  modified_base (14)..(14): methylated C nucleotide
ctcgggttgcgggcgcagggca

SEQ ID NO: 1286 - DNA, 20 bp, Artificial Sequence
  Synthetic
  modified_base (1)..(1): methylated C nucleotide
  modified_base (8)..(8): methylated C nucleotide
  modified_base (12)..(12): methylated C nucleotide
cgggttgcgggcgcagggca

SEQ ID NO: 1287 - DNA, 18 bp, Artificial Sequence
  Synthetic
  modified_base (6)..(6): methylated C nucleotide
  modified_base (10)..(10): methylated C nucleotide
ggttgcgggcgcagggca

SEQ ID NO: 1288 - DNA, 16 bp, Artificial Sequence
  Synthetic
  modified_base (4)..(4): methylated C nucleotide
  modified_base (8)..(8): methylated C nucleotide
ttgcgggcgcagggca

SEQ ID NO: 1289 - DNA, 15 bp, Artificial Sequence
  Synthetic
  modified_base (3)..(3): methylated C nucleotide
  modified_base (7)..(7): methylated C nucleotide
tgcgggcgcagggca

SEQ ID NO: 1290 - DNA, 24 bp, Artificial Sequence
  Synthetic
  modified_base (2)..(2): methylated C nucleotide
  modified_base (7)..(7): methylated C nucleotide
  modified_base (14)..(14): methylated C nucleotide
  modified_base (18)..(18): methylated C nucleotide
gcggctcgggttgcgggcgcaggg

SEQ ID NO: 1291 - DNA, 22 bp, Artificial Sequence
  Synthetic
  modified_base (2)..(2): methylated C nucleotide
  modified_base (7)..(7): methylated C nucleotide
  modified_base (14)..(14): methylated C nucleotide
  modified_base (18)..(18): methylated C nucleotide
gcggctcgggttgcgggcgcag

SEQ ID NO: 1292 - DNA, 20 bp, Artificial Sequence
  Synthetic
  modified_base (2)..(2): methylated C nucleotide
  modified_base (7)..(7): methylated C nucleotide
  modified_base (14)..(14): methylated C nucleotide
  modified_base (18)..(18): methylated C nucleotide
gcggctcgggttgcgggcgc

SEQ ID NO: 1293 - DNA, 18 bp, Artificial Sequence
  Synthetic
  modified_base (2)..(2): methylated C nucleotide
  modified_base (7)..(7): methylated C nucleotide
  modified_base (14)..(14): methylated C nucleotide
  modified_base (18)..(18): methylated C nucleotide
gcggctcgggttgcgggc

SEQ ID NO: 1294 - DNA, 16 bp, Artificial Sequence
  Synthetic
  modified_base (2)..(2): methylated C nucleotide
  modified_base (7)..(7): methylated C nucleotide
  modified_base (14)..(14): methylated C nucleotide
gcggctcgggttgcgg

SEQ ID NO: 1295 - DNA, 15 bp, Artificial Sequence
  Synthetic
  modified_base (2)..(2): methylated C nucleotide
  modified_base (7)..(7): methylated C nucleotide
  modified_base (14)..(14): methylated C nucleotide
gcggctcgggttgcg

SEQ ID NO: 1296 - DNA, 26 bp, Artificial Sequence
  Synthetic
  modified_base (2)..(2): methylated C nucleotide
  modified_base (7)..(7): methylated C nucleotide
  modified_base (14)..(14): methylated C nucleotide
  modified_base (18)..(18): methylated C nucleotide
gcgactcgggttgcgggcgcagggca

SEQ ID NO: 1297 - DNA, 26 bp, Artificial Sequence
  Synthetic
  modified_base (2)..(2): methylated C nucleotide
  modified_base (7)..(7): methylated C nucleotide
  modified_base (14)..(14): methylated C nucleotide
  modified_base (18)..(18): methylated C nucleotide
gcggctcgggttgcggtcgcagggca

SEQ ID NO: 1298 - DNA, 26 bp, Artificial Sequence
  Synthetic
  modified_base (2)..(2): methylated C nucleotide
  modified_base (7)..(7): methylated C nucleotide
  modified_base (14)..(14): methylated C nucleotide
  modified_base (18)..(18): methylated C nucleotide
gcggctcgggttccgggcgcagggca

SEQ ID NO: 1299 - DNA, 26 bp, Artificial Sequence
  Synthetic
  modified_base (6)..(6): methylated C nucleotide
  modified_base (12)..(12): methylated C nucleotide
  modified_base (19)..(19): methylated C nucleotide
  modified_base (24)..(24): methylated C nucleotide
aggggcggggacgctgagcgcaccga

SEQ ID NO: 1300 - DNA, 27 bp, Artificial Sequence
  Synthetic
  modified_base (7)..(7): methylated C nucleotide
  modified_base (13)..(13): methylated C nucleotide
  modified_base (20)..(20): methylated C nucleotide
  modified_base (25)..(25): methylated C nucleotide
aaggggcggggacgctgagcgcaccga

SEQ ID NO: 1301 - DNA, 28 bp, Artificial Sequence
  Synthetic
  modified_base (8)..(8): methylated C nucleotide
  modified_base (14)..(14): methylated C nucleotide
  modified_base (21)..(21): methylated C nucleotide
  modified_base (26)..(26): methylated C nucleotide
taaggggcggggacgctgagcgcaccga

SEQ ID NO: 1302 - DNA, 29 bp, Artificial Sequence
  Synthetic
  modified_base (9)..(9): methylated C nucleotide
  modified_base (15)..(15): methylated C nucleotide
  modified_base (22)..(22): methylated C nucleotide
  modified_base (27)..(27): methylated C nucleotide
gtaaggggcggggacgctgagcgcaccga

SEQ ID NO: 1303 - DNA, 30 bp, Artificial Sequence
  Synthetic
  modified_base (10)..(10): methylated C nucleotide
  modified_base (16)..(16): methylated C nucleotide
  modified_base (23)..(23): methylated C nucleotide
  modified_base (28)..(28): methylated C nucleotide
ggtaaggggcggggacgctgagcgcaccga

SEQ ID NO: 1304 - DNA, 31 bp, Artificial Sequence
  Synthetic
  modified_base (11)..(11): methylated C nucleotide
  modified_base (17)..(17): methylated C nucleotide
  modified_base (24)..(24): methylated C nucleotide
  modified_base (29)..(29): methylated C nucleotide
gggtaaggggcggggacgctgagcgcaccga

SEQ ID NO: 1305 - DNA, 27 bp, Artificial Sequence
  Synthetic
  modified_base (6)..(6): methylated C nucleotide
  modified_base (12)..(12): methylated C nucleotide
  modified_base (19)..(19): methylated C nucleotide
  modified_base (24)..(24): methylated C nucleotide
aggggcggggacgctgagcgcaccgag

SEQ ID NO: 1306 - DNA, 28 bp, Artificial Sequence
  Synthetic
  modified_base (6)..(6): methylated C nucleotide
  modified_base (12)..(12): methylated C nucleotide
  modified_base (19)..(19): methylated C nucleotide
  modified_base (24)..(24): methylated C nucleotide
aggggcggggacgctgagcgcaccgagc

SEQ ID NO: 1307 - DNA, 29 bp, Artificial Sequence
  Synthetic
  modified_base (6)..(6): methylated C nucleotide
  modified_base (12)..(12): methylated C nucleotide
  modified_base (19)..(19): methylated C nucleotide
  modified_base (24)..(24): methylated C nucleotide
aggggcggggacgctgagcgcaccgagca

SEQ ID NO: 1308 - DNA, 30 bp, Artificial Sequence
  Synthetic
  modified_base (6)..(6): methylated C nucleotide
  modified_base (12)..(12): methylated C nucleotide
  modified_base (19)..(19): methylated C nucleotide
  modified_base (24)..(24): methylated C nucleotide
aggggcggggacgctgagcgcaccgagcag

SEQ ID NO: 1309 - DNA, 31 bp, Artificial Sequence
  Synthetic
  modified_base (6)..(6): methylated C nucleotide
  modified_base (12)..(12): methylated C nucleotide
  modified_base (19)..(19): methylated C nucleotide
  modified_base (24)..(24): methylated C nucleotide
aggggcggggacgctgagcgcaccgagcagg

SEQ ID NO: 1310 - DNA, 28 bp, Artificial Sequence
  Synthetic
  modified_base (7)..(7): methylated C nucleotide
  modified_base (13)..(13): methylated C nucleotide
  modified_base (20)..(20): methylated C nucleotide
  modified_base (25)..(25): methylated C nucleotide
aaggggcggggacgctgagcgcaccgag

SEQ ID NO: 1311 - DNA, 30 bp, Artificial Sequence
  Synthetic
  modified_base (8)..(8): methylated C nucleotide
  modified_base (14)..(14): methylated C nucleotide
  modified_base (21)..(21): methylated C nucleotide
  modified_base (26)..(26): methylated C nucleotide
taaggggcggggacgctgagcgcaccgagc

SEQ ID NO: 1312 - DNA, 32 bp, Artificial Sequence
  Synthetic
  modified_base (9)..(9): methylated C nucleotide
  modified_base (15)..(15): methylated C nucleotide
  modified_base (22)..(22): methylated C nucleotide
  modified_base (27)..(27): methylated C nucleotide
gtaaggggcggggacgctgagcgcaccgagca

SEQ ID NO: 1313 - DNA, 34 bp, Artificial Sequence
  Synthetic
  modified_base (10)..(10): methylated C nucleotide
  modified_base (16)..(16): methylated C nucleotide
  modified_base (23)..(23): methylated C nucleotide
  modified_base (28)..(28): methylated C nucleotide
ggtaaggggcggggacgctgagcgcaccgagcag

SEQ ID NO: 1314 - DNA, 36 bp, Artificial Sequence
  Synthetic
  modified_base (11)..(11): methylated C nucleotide
  modified_base (17)..(17): methylated C nucleotide
  modified_base (24)..(24): methylated C nucleotide
  modified_base (29)..(29): methylated C nucleotide
gggtaaggggcggggacgctgagcgcaccgagcagg

SEQ ID NO: 1315 - DNA, 26 bp, Artificial Sequence
  Synthetic
  modified_base (9)..(9): methylated C nucleotide
  modified_base (15)..(15): methylated C nucleotide
  modified_base (22)..(22): methylated C nucleotide
gtaaggggcggggacgctgagcgcac

SEQ ID NO: 1316 - DNA, 26 bp, Artificial Sequence
  Synthetic
  modified_base (12)..(12): methylated C nucleotide
  modified_base (18)..(18): methylated C nucleotide
ggggtaaggggcggggacgctgagcg

SEQ ID NO: 1317 - DNA, 27 bp, Artificial Sequence
  Synthetic
  modified_base (15)..(15): methylated C nucleotide
  modified_base (21)..(21): methylated C nucleotide
tttggggtaaggggcggggacgctgag

SEQ ID NO: 1318 - DNA, 27 bp, Artificial Sequence
  Synthetic
  modified_base (18)..(18): methylated C nucleotide
  modified_base (24)..(24): methylated C nucleotide
gggtttggggtaaggggcggggacgct

SEQ ID NO: 1319 - DNA, 27 bp, Artificial Sequence
  Synthetic
  modified_base (21)..(21): methylated C nucleotide
  modified_base (27)..(27): methylated C nucleotide
tgggggtttggggtaaggggcggggac

SEQ ID NO: 1320 - DNA, 26 bp, Artificial Sequence
  Synthetic
  modified_base (3)..(3): methylated C nucleotide
  modified_base (9)..(9): methylated C nucleotide
  modified_base (16)..(16): methylated C nucleotide
  modified_base (21)..(21): methylated C nucleotide
ggcggggacgctgagcgcaccgagca

SEQ ID NO: 1321 - DNA, 26 bp, Artificial Sequence
  Synthetic
  modified_base (6)..(6): methylated C nucleotide
  modified_base (13)..(13): methylated C nucleotide
  modified_base (18)..(18): methylated C nucleotide
ggggacgctgagcgcaccgagcaggg

SEQ ID NO: 1322 - DNA, 26 bp, Artificial Sequence
  Synthetic
  modified_base (3)..(3): methylated C nucleotide
  modified_base (10)..(10): methylated C nucleotide
  modified_base (15)..(15): methylated C nucleotide
gacgctgagcgcaccgagcagggcgc

SEQ ID NO: 1323 - DNA, 26 bp, Artificial Sequence
  Synthetic
  modified_base (7)..(7): methylated C nucleotide
  modified_base (12)..(12): methylated C nucleotide
gctgagcgcaccgagcagggcgcggg

SEQ ID NO: 1324 - DNA, 26 bp, Artificial Sequence
  Synthetic
  modified_base (4)..(4): methylated C nucleotide
  modified_base (9)..(9): methylated C nucleotide
gagcgcaccgagcagggcgcgggctg

SEQ ID NO: 1325 - DNA, 24 bp, Artificial Sequence
  Synthetic
  modified_base (4)..(4): methylated C nucleotide
  modified_base (10)..(10): methylated C nucleotide
  modified_base (17)..(17): methylated C nucleotide
  modified_base (22)..(22): methylated C nucleotide
gggcggggacgctgagcgcaccga

SEQ ID NO: 1326 - DNA, 22 bp, Artificial Sequence
  Synthetic
  modified_base (2)..(2): methylated C nucleotide
  modified_base (8)..(8): methylated C nucleotide
  modified_base (15)..(15): methylated C nucleotide
  modified_base (20)..(20): methylated C nucleotide
gcggggacgctgagcgcaccga

SEQ ID NO: 1327 - DNA, 20 bp, Artificial Sequence
  Synthetic
  modified_base (6)..(6): methylated C nucleotide
  modified_base (13)..(13): methylated C nucleotide
  modified_base (18)..(18): methylated C nucleotide
ggggacgctgagcgcaccga

SEQ ID NO: 1328 - DNA, 18 bp, Artificial Sequence
  Synthetic
  modified_base (4)..(4): methylated C nucleotide
  modified_base (11)..(11): methylated C nucleotide
  modified_base (16)..(16): methylated C nucleotide
ggacgctgagcgcaccga

SEQ ID NO: 1329 - DNA, 16 bp, Artificial Sequence
  Synthetic
  modified_base (2)..(2): methylated C nucleotide
  modified_base (9)..(9): methylated C nucleotide
  modified_base (14)..(14): methylated C nucleotide
acgctgagcgcaccga

SEQ ID NO: 1330 - DNA, 14 bp, Artificial Sequence
  Synthetic
  modified_base (7)..(7): methylated C nucleotide
  modified_base (12)..(12): methylated C nucleotide
gctgagcgcaccga

SEQ ID NO: 1331 - DNA, 24 bp, Artificial Sequence
  Synthetic
  modified_base (6)..(6): methylated C nucleotide
  modified_base (12)..(12): methylated C nucleotide
  modified_base (19)..(19): methylated C nucleotide
  modified_base (24)..(24): methylated C nucleotide
aggggcggggacgctgagcgcacc

SEQ ID NO: 1332 - DNA, 22 bp, Artificial Sequence
  Synthetic
  modified_base (6)..(6): methylated C nucleotide
  modified_base (12)..(12): methylated C nucleotide
  modified_base (19)..(19): methylated C nucleotide
aggggcggggacgctgagcgca

SEQ ID NO: 1333 - DNA, 20 bp, Artificial Sequence
  Synthetic
  modified_base (6)..(6): methylated C nucleotide
  modified_base (12)..(12): methylated C nucleotide
  modified_base (19)..(19): methylated C nucleotide
aggggcggggacgctgagcg

SEQ ID NO: 1334 - DNA, 19 bp, Artificial Sequence
  Synthetic
  modified_base (6)..(6): methylated C nucleotide
  modified_base (12)..(12): methylated C nucleotide
  modified_base (19)..(19): methylated C nucleotide
aggggcggggacgctgagc

SEQ ID NO: 1335 - DNA, 17 bp, Artificial Sequence
  Synthetic
  modified_base (6)..(6): methylated C nucleotide
  modified_base (12)..(12): methylated C nucleotide
aggggcggggacgctga

SEQ ID NO: 1336 - DNA, 15 bp, Artificial Sequence
  Synthetic
  modified_base (6)..(6): methylated C nucleotide
  modified_base (12)..(12): methylated C nucleotide
aggggcggggacgct

SEQ ID NO: 1337 - DNA, 26 bp, Artificial Sequence
  Synthetic
  modified_base (6)..(6): methylated C nucleotide
  modified_base (12)..(12): methylated C nucleotide
  modified_base (19)..(19): methylated C nucleotide
  modified_base (24)..(24): methylated C nucleotide
aggggcgaggacgctgagcgcaccga

SEQ ID NO: 1338 - DNA, 26 bp, Artificial Sequence
  Synthetic
  modified_base (6)..(6): methylated C nucleotide
  modified_base (12)..(12): methylated C nucleotide
  modified_base (19)..(19): methylated C nucleotide
  modified_base (24)..(24): methylated C nucleotide
aggggcggggacgctgatcgcaccga

SEQ ID NO: 1339 - DNA, 26 bp, Artificial Sequence
  Synthetic
  modified_base (6)..(6): methylated C nucleotide
  modified_base (12)..(12): methylated C nucleotide
  modified_base (19)..(19): methylated C nucleotide
  modified_base (24)..(24): methylated C nucleotide
aggggcggggacgctcagcgcaccga

SEQ ID NO: 1340 - DNA, 35 bp, Artificial Sequence; identical to SEQ ID NO: 136
  Synthetic
  modified_base (7)..(7): methylated C nucleotide
  modified_base (10)..(10): methylated C nucleotide
  modified_base (12)..(12): methylated C nucleotide
  modified_base (17)..(17): methylated C nucleotide
  modified_base (25)..(25): methylated C nucleotide
  modified_base (30)..(30): methylated C nucleotide
  modified_base (33)..(33): methylated C nucleotide

SEQ ID NO: 1341 - DNA, 36 bp, Artificial Sequence
  Synthetic
  modified_base (8)..(8): methylated C nucleotide
  modified_base (11)..(11): methylated C nucleotide
  modified_base (13)..(13): methylated C nucleotide
  modified_base (18)..(18): methylated C nucleotide
  modified_base (26)..(26): methylated C nucleotide
  modified_base (31)..(31): methylated C nucleotide
  modified_base (34)..(34): methylated C nucleotide
agcctggcggcgcgagccgggcacccgggccgacga

SEQ ID NO: 1342 - DNA, 37 bp, Artificial Sequence
  Synthetic
  modified_base (9)..(9): methylated C nucleotide
  modified_base (12)..(12): methylated C nucleotide
  modified_base (14)..(14): methylated C nucleotide
  modified_base (19)..(19): methylated C nucleotide
  modified_base (27)..(27): methylated C nucleotide
  modified_base (32)..(32): methylated C nucleotide
  modified_base (35)..(35): methylated C nucleotide
gagcctggcggcgcgagccgggcacccgggccgacga

SEQ ID NO: 1343 - DNA, 38 bp, Artificial Sequence
  Synthetic
  modified_base (10)..(10): methylated C nucleotide
  modified_base (13)..(13): methylated C nucleotide
  modified_base (15)..(15): methylated C nucleotide
  modified_base (20)..(20): methylated C nucleotide
  modified_base (28)..(28): methylated C nucleotide
  modified_base (33)..(33): methylated C nucleotide
  modified_base (36)..(36): methylated C nucleotide
agagcctggcggcgcgagccgggcacccgggccgacga

SEQ ID NO: 1344 - DNA, 39 bp, Artificial Sequence
  Synthetic
  modified_base (11)..(11): methylated C nucleotide
  modified_base (14)..(14): methylated C nucleotide
  modified_base (16)..(16): methylated C nucleotide
  modified_base (21)..(21): methylated C nucleotide
  modified_base (29)..(29): methylated C nucleotide
  modified_base (34)..(34): methylated C nucleotide
  modified_base (37)..(37): methylated C nucleotide
cagagcctggcggcgcgagccgggcacccgggccgacga

SEQ ID NO: 1345 - DNA, 40 bp, Artificial Sequence
  Synthetic
  modified_base (12)..(12): methylated C nucleotide
  modified_base (15)..(15): methylated C nucleotide
  modified_base (17)..(17): methylated C nucleotide
  modified_base (22)..(22): methylated C nucleotide
  modified_base (30)..(30): methylated C nucleotide
  modified_base (35)..(35): methylated C nucleotide
  modified_base (38)..(38): methylated C nucleotide
ccagagcctggcggcgcgagccgggcacccgggccgacga

SEQ ID NO: 1346 - DNA, 36 bp, Artificial Sequence
  Synthetic
  modified_base (7)..(7): methylated C nucleotide
  modified_base (10)..(10): methylated C nucleotide
  modified_base (12)..(12): methylated C nucleotide
  modified_base (17)..(17): methylated C nucleotide
  modified_base (25)..(25): methylated C nucleotide
  modified_base (30)..(30): methylated C nucleotide
  modified_base (33)..(33): methylated C nucleotide
gcctggcggcgcgagccgggcacccgggccgacgaa

SEQ ID NO: 1347 - DNA, 37 bp, Artificial Sequence
  Synthetic
  modified_base (7)..(7): methylated C nucleotide
  modified_base (10)..(10): methylated C nucleotide
  modified_base (12)..(12): methylated C nucleotide
  modified_base (17)..(17): methylated C nucleotide
  modified_base (25)..(25): methylated C nucleotide
  modified_base (30)..(30): methylated C nucleotide
  modified_base (33)..(33): methylated C nucleotide
gcctggcggcgcgagccgggcacccgggccgacgaaa

SEQ ID NO: 1348 - DNA, 38 bp, Artificial Sequence
  Synthetic
  modified_base (7)..(7): methylated C nucleotide
  modified_base (10)..(10): methylated C nucleotide
  modified_base (12)..(12): methylated C nucleotide
  modified_base (17)..(17): methylated C nucleotide
  modified_base (25)..(25): methylated C nucleotide
  modified_base (30)..(30): methylated C nucleotide
  modified_base (33)..(33): methylated C nucleotide
gcctggcggcgcgagccgggcacccgggccgacgaaaa

SEQ ID NO: 1349 - DNA, 39 bp, Artificial Sequence
  Synthetic
  modified_base (7)..(7): methylated C nucleotide
  modified_base (10)..(10): methylated C nucleotide
  modified_base (12)..(12): methylated C nucleotide
  modified_base (17)..(17): methylated C nucleotide
  modified_base (25)..(25): methylated C nucleotide
  modified_base (30)..(30): methylated C nucleotide
  modified_base (33)..(33): methylated C nucleotide
gcctggcggcgcgagccgggcacccgggccgacgaaaag

SEQ ID NO: 1350 - DNA, 40 bp, Artificial Sequence
  Synthetic
  modified_base (7)..(7): methylated C nucleotide
  modified_base (10)..(10): methylated C nucleotide
  modified_base (12)..(12): methylated C nucleotide
  modified_base (17)..(17): methylated C nucleotide
  modified_base (25)..(25): methylated C nucleotide
  modified_base (30)..(30): methylated C nucleotide
  modified_base (33)..(33): methylated C nucleotide
gcctggcggcgcgagccgggcacccgggccgacgaaaagg

SEQ ID NO: 1351 - DNA, 37 bp, Artificial Sequence
  Synthetic
  modified_base (8)..(8): methylated  C nucleotide
  modified_base (11)..(11): methylated  C nucleotide
  modified_base (13)..(13): methylated  C nucleotide
  modified_base (18)..(18): methylated  C nucleotide
  modified_base (26)..(26): methylated  C nucleotide
  modified_base (31)..(31): methylated  C nucleotide
  modified_base (34)..(34): methylated  C nucleotide
agcctggcggcgcgagccgggcacccgggccgacgaa

SEQ ID NO: 1352 - DNA, 39 bp, Artificial Sequence
  Synthetic
  modified_base (9)..(9): methylated C nucleotide
  modified_base (12)..(12): methylated C nucleotide
  modified_base (14)..(14): methylated C nucleotide
  modified_base (19)..(19): methylated C nucleotide
  modified_base (27)..(27): methylated C nucleotide
  modified_base (32)..(32): methylated C nucleotide
  modified_base (35)..(35): methylated C nucleotide
gagcctggcggcgcgagccgggcacccgggccgacgaaa

SEQ ID NO: 1353 - DNA, 41 bp, Artificial Sequence
  Synthetic
  modified_base (10)..(10): methylated C nucleotide
  modified_base (13)..(13): methylated C nucleotide
  modified_base (15)..(15): methylated C nucleotide
  modified_base (20)..(20): methylated C nucleotide
  modified_base (28)..(28): methylated C nucleotide
  modified_base (33)..(33): methylated C nucleotide
  modified_base (36)..(36): methylated C nucleotide
agagcctggcggcgcgagccgggcacccgggccgacgaaaa

SEQ ID NO: 1354 - DNA, 43 bp, Artificial Sequence
  Synthetic
  modified_base (11)..(11): methylated C nucleotide
  modified_base (14)..(14): methylated C nucleotide
  modified_base (16)..(16): methylated C nucleotide
  modified_base (21)..(21): methylated C nucleotide
  modified_base (29)..(29): methylated C nucleotide
  modified_base (34)..(34): methylated C nucleotide
  modified_base (37)..(37): methylated C nucleotide
cagagcctggcggcgcgagccgggcacccgggccgacgaaaag

SEQ ID NO: 1355 - DNA, 45 bp, Artificial Sequence
  Synthetic
  modified_base (12)..(12): methylated C nucleotide
  modified_base (15)..(15): methylated C nucleotide
  modified_base (17)..(17): methylated C nucleotide
  modified_base (22)..(22): methylated C nucleotide
  modified_base (30)..(30): methylated C nucleotide
  modified_base (35)..(35): methylated C nucleotide
  modified_base (38)..(38): methylated C nucleotide
ccagagcctggcggcgcgagccgggcacccgggccgacgaaaagg

SEQ ID NO: 1356 - DNA, 35 bp, Artificial Sequence
  Synthetic
  modified_base (10)..(10): methylated C nucleotide
  modified_base (13)..(13): methylated C nucleotide
  modified_base (15)..(15): methylated C nucleotide
  modified_base (20)..(20): methylated C nucleotide
  modified_base (28)..(28): methylated C nucleotide
  modified_base (33)..(33): methylated C nucleotide
agagcctggcggcgcgagccgggcacccgggccga

SEQ ID NO: 1357 - DNA, 35 bp, Artificial Sequence
  Synthetic
  modified_base (13)..(13): methylated C nucleotide
  modified_base (16)..(16): methylated C nucleotide
  modified_base (18)..(18): methylated C nucleotide
  modified_base (23)..(23): methylated C nucleotide
  modified_base (31)..(31): methylated C nucleotide
cccagagcctggcggcgcgagccgggcacccgggc

SEQ ID NO: 1358 - DNA, 35 bp, Artificial Sequence
  Synthetic
  modified_base (16)..(16): methylated C nucleotide
  modified_base (19)..(19): methylated C nucleotide
  modified_base (21)..(21): methylated C nucleotide
  modified_base (26)..(26): methylated C nucleotide
  modified_base (34)..(34): methylated C nucleotide
gatcccagagcctggcggcgcgagccgggcacccg

SEQ ID NO: 1359 - DNA, 35 bp, Artificial Sequence
  Synthetic
  modified_base (19)..(19): methylated C nucleotide
  modified_base (22)..(22): methylated C nucleotide
  modified_base (24)..(24): methylated C nucleotide
  modified_base (29)..(29): methylated C nucleotide
tgggatcccagagcctggcggcgcgagccgggcac

SEQ ID NO: 1360 - DNA, 35 bp, Artificial Sequence
  Synthetic
  modified_base (22)..(22): methylated C nucleotide
  modified_base (25)..(25): methylated C nucleotide
  modified_base (27)..(27): methylated C nucleotide
  modified_base (32)..(32): methylated C nucleotide
acctgggatcccagagcctggcggcgcgagccggg

SEQ ID NO: 1361 - DNA, 35 bp, Artificial Sequence
  Synthetic
  modified_base (4)..(4): methylated C nucleotide
  modified_base (7)..(7): methylated C nucleotide
  modified_base (9)..(9): methylated C nucleotide
  modified_base (14)..(14): methylated C nucleotide
  modified_base (22)..(22): methylated C nucleotide
  modified_base (27)..(27): methylated C nucleotide
  modified_base (30)..(30): methylated C nucleotide
tggcggcgcgagccgggcacccgggccgacgaaaa

SEQ ID NO: 1362 - DNA, 35 bp, Artificial Sequence
  Synthetic
  modified_base (1)..(1): methylated C nucleotide
  modified_base (4)..(4): methylated C nucleotide
  modified_base (6)..(6): methylated C nucleotide
  modified_base (11)..(11): methylated C nucleotide
  modified_base (19)..(19): methylated C nucleotide
  modified_base (24)..(24): methylated C nucleotide
  modified_base (27)..(27): methylated C nucleotide
cggcgcgagccgggcacccgggccgacgaaaaggc

SEQ ID NO: 1363 - DNA, 35 bp, Artificial Sequence
  Synthetic
  modified_base (1)..(1): methylated C nucleotide
  modified_base (3)..(3): methylated C nucleotide
  modified_base (8)..(8): methylated C nucleotide
  modified_base (16)..(16): methylated C nucleotide
  modified_base (21)..(21): methylated C nucleotide
  modified_base (24)..(24): methylated C nucleotide
cgcgagccgggcacccgggccgacgaaaaggcagg

SEQ ID NO: 1364 - DNA, 35 bp, Artificial Sequence
  Synthetic
  modified_base (5)..(5): methylated C nucleotide
  modified_base (13)..(13): methylated C nucleotide
  modified_base (18)..(18): methylated C nucleotide
  modified_base (21)..(21): methylated C nucleotide
gagccgggcacccgggccgacgaaaaggcaggaag

SEQ ID NO: 1365 - DNA, 35 bp, Artificial Sequence
  Synthetic
  modified_base (2)..(2): methylated C nucleotide
  modified_base (10)..(10): methylated C nucleotide
  modified_base (15)..(15): methylated C nucleotide
  modified_base (18)..(18): methylated C nucleotide
ccgggcacccgggccgacgaaaaggcaggaagcgc

SEQ ID NO: 1366 - DNA, 33 bp, Artificial Sequence
  Synthetic
  modified_base (5)..(5): methylated C nucleotide
  modified_base (8)..(8): methylated C nucleotide
  modified_base (10)..(10): methylated C nucleotide
  modified_base (15)..(15): methylated C nucleotide
  modified_base (23)..(23): methylated C nucleotide
  modified_base (28)..(28): methylated C nucleotide
  modified_base (31)..(31): methylated C nucleotide
ctggcggcgcgagccgggcacccgggccgacga

SEQ ID NO: 1367 - DNA, 31 bp, Artificial Sequence
  Synthetic
  modified_base (3)..(3): methylated C nucleotide
  modified_base (6)..(6): methylated C nucleotide
  modified_base (8)..(8): methylated C nucleotide
  modified_base (13)..(13): methylated C nucleotide
  modified_base (21)..(21): methylated C nucleotide
  modified_base (26)..(26): methylated C nucleotide
  modified_base (29)..(29): methylated C nucleotide
ggcggcgcgagccgggcacccgggccgacga

SEQ ID NO: 1368 - DNA, 29 bp, Artificial Sequence
  Synthetic
  modified_base (1)..(1): methylated C nucleotide
  modified_base (4)..(4): methylated C nucleotide
  modified_base (6)..(6): methylated C nucleotide
  modified_base (11)..(11): methylated C nucleotide
  modified_base (19)..(19): methylated C nucleotide
  modified_base (24)..(24): methylated C nucleotide
  modified_base (27)..(27): methylated C nucleotide
cggcgcgagccgggcacccgggccgacga

SEQ ID NO: 1369 - DNA, 27 bp, Artificial Sequence
  Synthetic
  modified_base (2)..(2): methylated C nucleotide
  modified_base (4)..(4): methylated C nucleotide
  modified_base (9)..(9): methylated C nucleotide
  modified_base (17)..(17): methylated C nucleotide
  modified_base (22)..(22): methylated C nucleotide
  modified_base (25)..(25): methylated C nucleotide
gcgcgagccgggcacccgggccgacga

SEQ ID NO: 1370 - DNA, 25 bp, Artificial Sequence
  Synthetic
  modified_base (2)..(2): methylated C nucleotide
  modified_base (7)..(7): methylated C nucleotide
  modified_base (15)..(15): methylated C nucleotide
  modified_base (20)..(20): methylated C nucleotide
  modified_base (23)..(23): methylated C nucleotide
gcgagccgggcacccgggccgacga

SEQ ID NO: 1371 - DNA, 23 bp, Artificial Sequence
  Synthetic
  modified_base (5)..(5): methylated C nucleotide
  modified_base (13)..(13): methylated C nucleotide
  modified_base (18)..(18): methylated C nucleotide
  modified_base (21)..(21): methylated C nucleotide
gagccgggcacccgggccgacga

SEQ ID NO: 1372 - DNA, 21 bp, Artificial Sequence
  Synthetic
  modified_base (3)..(3): methylated C nucleotide
  modified_base (11)..(11): methylated C nucleotide
  modified_base (16)..(16): methylated C nucleotide
  modified_base (19)..(19): methylated C nucleotide
gccgggcacccgggccgacga

SEQ ID NO: 1373 - DNA, 19 bp, Artificial Sequence
  Synthetic
  modified_base (1)..(1): methylated C nucleotide
  modified_base (9)..(9): methylated C nucleotide
  modified_base (14)..(14): methylated C nucleotide
  modified_base (17)..(17): methylated C nucleotide
cgggcacccgggccgacga

SEQ ID NO: 1374 - DNA, 17 bp, Artificial Sequence
  Synthetic
  modified_base (7)..(7): methylated C nucleotide
  modified_base (12)..(12): methylated C nucleotide
  modified_base (15)..(15): methylated C nucleotide
ggcacccgggccgacga

SEQ ID NO: 1375 - DNA, 15 bp, Artificial Sequence
  Synthetic
  modified_base (5)..(5): methylated C nucleotide
  modified_base (10)..(10): methylated C nucleotide
  modified_base (13)..(13): methylated C nucleotide
cacccgggccgacga

SEQ ID NO: 1376 - DNA, 33 bp, Artificial Sequence
  Synthetic
  modified_base (7)..(7): methylated C nucleotide
  modified_base (10)..(10): methylated C nucleotide
  modified_base (12)..(12): methylated C nucleotide
  modified_base (17)..(17): methylated C nucleotide
  modified_base (25)..(25): methylated C nucleotide
  modified_base (30)..(30): methylated C nucleotide
  modified_base (33)..(33): methylated C nucleotide
gcctggcggcgcgagccgggcacccgggccgac

SEQ ID NO: 1377 - DNA, 31 bp, Artificial Sequence
  Synthetic
  modified_base (7)..(7): methylated C nucleotide
  modified_base (10)..(10): methylated C nucleotide
  modified_base (12)..(12): methylated C nucleotide
  modified_base (17)..(17): methylated C nucleotide
  modified_base (25)..(25): methylated C nucleotide
  modified_base (30)..(30): methylated C nucleotide
gcctggcggcgcgagccgggcacccgggccg

SEQ ID NO: 1378 - DNA, 29 bp, Artificial Sequence
  Synthetic
  modified_base (7)..(7): methylated C nucleotide
  modified_base (10)..(10): methylated C nucleotide
  modified_base (12)..(12): methylated C nucleotide
  modified_base (17)..(17): methylated C nucleotide
  modified_base (25)..(25): methylated C nucleotide
gcctggcggcgcgagccgggcacccgggc

SEQ ID NO: 1379 - DNA, 27 bp, Artificial Sequence
  Synthetic
  modified_base (7)..(7): methylated C nucleotide
  modified_base (10)..(10): methylated C nucleotide
  modified_base (12)..(12): methylated C nucleotide
  modified_base (17)..(17): methylated C nucleotide
  modified_base (25)..(25): methylated C nucleotide
gcctggcggcgcgagccgggcacccgg

SEQ ID NO: 1380 - DNA, 25 bp, Artificial Sequence
  Synthetic
  modified_base (7)..(7): methylated C nucleotide
  modified_base (10)..(10): methylated C nucleotide
  modified_base (12)..(12): methylated C nucleotide
  modified_base (17)..(17): methylated C nucleotide
  modified_base (25)..(25): methylated C nucleotide
gcctggcggcgcgagccgggcaccc

SEQ ID NO: 1381 - DNA, 23 bp, Artificial Sequence
  Synthetic
  modified_base (7)..(7): methylated C nucleotide
  modified_base (10)..(10): methylated C nucleotide
  modified_base (12)..(12): methylated C nucleotide
  modified_base (17)..(17): methylated C nucleotide
gcctggcggcgcgagccgggcac

SEQ ID NO: 1382 - DNA, 21 bp, Artificial Sequence
  Synthetic
  modified_base (7)..(7): methylated C nucleotide
  modified_base (10)..(10): methylated C nucleotide
  modified_base (12)..(12): methylated C nucleotide
  modified_base (17)..(17): methylated C nucleotide
gcctggcggcgcgagccgggc

SEQ ID NO: 1383 - DNA, 19 bp, Artificial Sequence
  Synthetic
  modified_base (7)..(7): methylated C nucleotide
  modified_base (10)..(10): methylated C nucleotide
  modified_base (12)..(12): methylated C nucleotide
  modified_base (17)..(17): methylated C nucleotide
gcctggcggcgcgagccgg

SEQ ID NO: 1384 - DNA, 17 bp, Artificial Sequence
  Synthetic
  modified_base (7)..(7): methylated C nucleotide
  modified_base (10)..(10): methylated C nucleotide
  modified_base (12)..(12): methylated C nucleotide
  modified_base (17)..(17): methylated C nucleotide
gcctggcggcgcgagcc

SEQ ID NO: 1385 - DNA, 15 bp, Artificial Sequence
  Synthetic
  modified_base (7)..(7): methylated C nucleotide
  modified_base (10)..(10): methylated C nucleotide
  modified_base (12)..(12): methylated C nucleotide
gcctggcggcgcgag

SEQ ID NO: 1386 - DNA, 35 bp, Artificial Sequence
  Synthetic
  modified_base (7)..(7): methylated C nucleotide
  modified_base (10)..(10): methylated C nucleotide
  modified_base (12)..(12): methylated C nucleotide
  modified_base (17)..(17): methylated C nucleotide
  modified_base (25)..(25): methylated C nucleotide
  modified_base (30)..(30): methylated C nucleotide
  modified_base (33)..(33): methylated C nucleotide
gcctggcggcgcgagccaggcacccgggccgacga

SEQ ID NO: 1387 - DNA, 35 bp, Artificial Sequence
  Synthetic
  modified_base (7)..(7): methylated C nucleotide
  modified_base (10)..(10): methylated C nucleotide
  modified_base (12)..(12): methylated C nucleotide
  modified_base (17)..(17): methylated C nucleotide
  modified_base (25)..(25): methylated C nucleotide
  modified_base (30)..(30): methylated C nucleotide
  modified_base (33)..(33): methylated C nucleotide
gcctggcgccgcgagccgggcacccgggccgacga

SEQ ID NO: 1388 - DNA, 35 bp, Artificial Sequence
  Synthetic
  modified_base (7)..(7): methylated C nucleotide
  modified_base (10)..(10): methylated C nucleotide
  modified_base (12)..(12): methylated C nucleotide
  modified_base (17)..(17): methylated C nucleotide
  modified_base (25)..(25): methylated C nucleotide
  modified_base (30)..(30): methylated C nucleotide
  modified_base (33)..(33): methylated C nucleotide
gcctggcggcgcgagccgggcacccgggcctacga

SEQ ID NO: 1389 - DNA, 33 bp, Artificial Sequence
  Synthetic
  modified_base (4)..(4): methylated C nucleotide
  modified_base (9)..(9): methylated C nucleotide
  modified_base (31)..(31): methylated C nucleotide
gggcggggcgacctgggatcccaggcctggcgg

SEQ ID NO: 1390 - DNA, 34 bp, Artificial Sequence
  Synthetic
  modified_base (5)..(5): methylated C nucleotide
  modified_base (10)..(10): methylated C nucleotide
  modified_base (32)..(32): methylated C nucleotide
tgggcggggcgacctgggatcccaggcctggcgg

SEQ ID NO: 1391 - DNA, 35 bp, Artificial Sequence
  Synthetic
  modified_base (6)..(6): methylated C nucleotide
  modified_base (11)..(11): methylated C nucleotide
  modified_base (33)..(33): methylated C nucleotide
ctgggcggggcgacctgggatcccaggcctggcgg

SEQ ID NO: 1392 - DNA, 36 bp, Artificial Sequence
  Synthetic
  modified_base (7)..(7): methylated C nucleotide
  modified_base (12)..(12): methylated C nucleotide
  modified_base (34)..(34): methylated C nucleotide
gctgggcggggcgacctgggatcccaggcctggcgg

SEQ ID NO: 1393 - DNA, 37 bp, Artificial Sequence
  Synthetic
  modified_base (8)..(8): methylated C nucleotide
  modified_base (13)..(13): methylated C nucleotide
  modified_base (35)..(35): methylated C nucleotide
tgctgggcggggcgacctgggatcccaggcctggcgg

SEQ ID NO: 1394 - DNA, 38 bp, Artificial Sequence
  Synthetic
  modified_base (9)..(9): methylated C nucleotide
  modified_base (14)..(14): methylated C nucleotide
  modified_base (36)..(36): methylated C nucleotide
ctgctgggcggggcgacctgggatcccaggcctggcgg

SEQ ID NO: 1395 - DNA, 34 bp, Artificial Sequence
  Synthetic
  modified_base (4)..(4): methylated C nucleotide
  modified_base (9)..(9): methylated C nucleotide
  modified_base (31)..(31): methylated C nucleotide
gggcggggcgacctgggatcccaggcctggcggc

SEQ ID NO: 1396 - DNA, 35 bp, Artificial Sequence
  Synthetic
  modified_base (4)..(4): methylated C nucleotide
  modified_base (9)..(9): methylated C nucleotide
  modified_base (31)..(31): methylated C nucleotide
gggcggggcgacctgggatcccaggcctggcggcg

SEQ ID NO: 1397 - DNA, 36 bp, Artificial Sequence
  Synthetic
  modified_base (4)..(4): methylated C nucleotide
  modified_base (9)..(9): methylated C nucleotide
  modified_base (31)..(31): methylated C nucleotide
gggcggggcgacctgggatcccaggcctggcggcgc

SEQ ID NO: 1398 - DNA, 37 bp, Artificial Sequence
  Synthetic
  modified_base (4)..(4): methylated C nucleotide
  modified_base (9)..(9): methylated C nucleotide
  modified_base (31)..(31): methylated C nucleotide
gggcggggcgacctgggatcccaggcctggcggcgcg

SEQ ID NO: 1399 - DNA, 38 bp, Artificial Sequence
  Synthetic
  modified_base (4)..(4): methylated C nucleotide
  modified_base (9)..(9): methylated C nucleotide
  modified_base (31)..(31): methylated C nucleotide
gggcggggcgacctgggatcccaggcctggcggcgcga

SEQ ID NO: 1400 - DNA, 35 bp, Artificial Sequence
  Synthetic
  modified_base (5)..(5): methylated C nucleotide
  modified_base (10)..(10): methylated C nucleotide
  modified_base (32)..(32): methylated C nucleotide
tgggcggggcgacctgggatcccaggcctggcggc

SEQ ID NO: 1401 - DNA, 37 bp, Artificial Sequence
  Synthetic
  modified_base (6)..(6): methylated C nucleotide
  modified_base (11)..(11): methylated C nucleotide
  modified_base (33)..(33): methylated C nucleotide
ctgggcggggcgacctgggatcccaggcctggcggcg

SEQ ID NO: 1402 - DNA, 39 bp, Artificial Sequence
  Synthetic
  modified_base (7)..(7): methylated C nucleotide
  modified_base (12)..(12): methylated C nucleotide
  modified_base (34)..(34): methylated C nucleotide
gctgggcggggcgacctgggatcccaggcctggcggcgc

SEQ ID NO: 1403 - DNA, 41 bp, Artificial Sequence
  Synthetic
  modified_base (8)..(8): methylated C nucleotide
  modified_base (13)..(13): methylated C nucleotide
  modified_base (35)..(35): methylated C nucleotide
tgctgggcggggcgacctgggatcccaggcctggcggcgcg

SEQ ID NO: 1404 - DNA, 43 bp, Artificial Sequence
  Synthetic
  modified_base (9)..(9): methylated C nucleotide
  modified_base (14)..(14): methylated C nucleotide
  modified_base (36)..(36): methylated C nucleotide
ctgctgggcggggcgacctgggatcccaggcctggcggcgcga

SEQ ID NO: 1405 - DNA, 33 bp, Artificial Sequence
  Synthetic
  modified_base (7)..(7): methylated C nucleotide
  modified_base (12)..(12): methylated C nucleotide
gctgggcggggcgacctgggatcccaggcctgg

SEQ ID NO: 1406 - DNA, 33 bp, Artificial Sequence
  Synthetic
  modified_base (10)..(10): methylated C nucleotide
  modified_base (15)..(15): methylated C nucleotide
gctgctgggcggggcgacctgggatcccaggcc

SEQ ID NO: 1407 - DNA, 33 bp, Artificial Sequence
  Synthetic
  modified_base (13)..(13): methylated C nucleotide
  modified_base (18)..(18): methylated C nucleotide
cgggctgctgggcggggcgacctgggatcccag

SEQ ID NO: 1408 - DNA, 34 bp, Artificial Sequence
  Synthetic
  modified_base (16)..(16): methylated C nucleotide
  modified_base (21)..(21): methylated C nucleotide
gcgcgggctgctgggcggggcgacctgggatccc

SEQ ID NO: 1409 - DNA, 34 bp, Artificial Sequence
  Synthetic
  modified_base (19)..(19): methylated C nucleotide
  modified_base (24)..(24): methylated C nucleotide
agggcgcgggctgctgggcggggcgacctgggat

SEQ ID NO: 1410 - DNA, 33 bp, Artificial Sequence
  Synthetic
  modified_base (1)..(1): methylated C nucleotide
  modified_base (6)..(6): methylated C nucleotide
  modified_base (28)..(28): methylated C nucleotide
cggggcgacctgggatcccaggcctggcggcgc

SEQ ID NO: 1411 - DNA, 33 bp, Artificial Sequence
  Synthetic
  modified_base (3)..(3): methylated C nucleotide
  modified_base (25)..(25): methylated C nucleotide
ggcgacctgggatcccaggcctggcggcgcgag

SEQ ID NO: 1412 - DNA, 33 bp, Artificial Sequence
  Synthetic
  modified_base (22)..(22): methylated C nucleotide
gacctgggatcccaggcctggcggcgcgagccg

SEQ ID NO: 1413 - DNA, 33 bp, Artificial Sequence
  Synthetic
  modified_base (19)..(19): methylated C nucleotide
ctgggatcccaggcctggcggcgcgagccgggc

SEQ ID NO: 1414 - DNA, 33 bp, Artificial Sequence
  Synthetic
  modified_base (16)..(16): methylated C nucleotide
ggatcccaggcctggcggcgcgagccgggcacc

SEQ ID NO: 1415 - DNA, 31 bp, Artificial Sequence
  Synthetic
  modified_base (2)..(2): methylated C nucleotide
  modified_base (7)..(7): methylated C nucleotide
  modified_base (29)..(29): methylated C nucleotide
gcggggcgacctgggatcccaggcctggcgg

SEQ ID NO: 1416 - DNA, 29 bp, Artificial Sequence
  Synthetic
  modified_base (5)..(5): methylated C nucleotide
  modified_base (27)..(27): methylated C nucleotide
ggggcgacctgggatcccaggcctggcgg

SEQ ID NO: 1417 - DNA, 27 bp, Artificial Sequence
  Synthetic
  modified_base (3)..(3): methylated C nucleotide
  modified_base (25)..(25): methylated C nucleotide
ggcgacctgggatcccaggcctggcgg

SEQ ID NO: 1418 - DNA, 25 bp, Artificial Sequence
  Synthetic
  modified_base (1)..(1): methylated C nucleotide
  modified_base (23)..(23): methylated C nucleotide
cgacctgggatcccaggcctggcgg

SEQ ID NO: 1419 - DNA, 23 bp, Artificial Sequence
  Synthetic
  modified_base (21)..(21): methylated C nucleotide
acctgggatcccaggcctggcgg

SEQ ID NO: 1420 - DNA, 21 bp, Artificial Sequence
  Synthetic
  modified_base (19)..(19): methylated C nucleotide
ctgggatcccaggcctggcgg

SEQ ID NO: 1421 - DNA, 19 bp, Artificial Sequence
  Synthetic
  modified_base (17)..(17): methylated C nucleotide
gggatcccaggcctggcgg

SEQ ID NO: 1422 - DNA, 17 bp, Artificial Sequence
  Synthetic
  modified_base (15)..(15): methylated C nucleotide
gatcccaggcctggcgg

SEQ ID NO: 1423 - DNA, 15 bp, Artificial Sequence
  Synthetic
  modified_base (13)..(13): methylated C nucleotide
tcccaggcctggcgg

SEQ ID NO: 1424 - DNA, 14 bp, Artificial Sequence
  Synthetic
  modified_base (12)..(12): methylated C nucleotide
cccaggcctggcgg

SEQ ID NO: 1425 - DNA, 31 bp, Artificial Sequence
  Synthetic
  modified_base (4)..(4): methylated C nucleotide
  modified_base (9)..(9): methylated C nucleotide
  modified_base (31)..(31): methylated C nucleotide
gggcggggcgacctgggatcccaggcctggc

SEQ ID NO: 1426 - DNA, 29 bp, Artificial Sequence
  Synthetic
  modified_base (4)..(4): methylated C nucleotide
  modified_base (9)..(9): methylated C nucleotide
gggcggggcgacctgggatcccaggcctg

SEQ ID NO: 1427 - DNA, 27 bp, Artificial Sequence
  Synthetic
  modified_base (4)..(4): methylated C nucleotide
  modified_base (9)..(9): methylated C nucleotide
gggcggggcgacctgggatcccaggcc

SEQ ID NO: 1428 - DNA, 25 bp, Artificial Sequence
  Synthetic
  modified_base (4)..(4): methylated C nucleotide
  modified_base (9)..(9): methylated C nucleotide
gggcggggcgacctgggatcccagg

SEQ ID NO: 1429 - DNA, 24 bp, Artificial Sequence
  Synthetic
  modified_base (4)..(4): methylated C nucleotide
  modified_base (9)..(9): methylated C nucleotide
gggcggggcgacctgggatcccag

SEQ ID NO: 1430 - DNA, 22 bp, Artificial Sequence
  Synthetic
  modified_base (4)..(4): methylated C nucleotide
  modified_base (9)..(9): methylated C nucleotide
gggcggggcgacctgggatccc

SEQ ID NO: 1431 - DNA, 20 bp, Artificial Sequence
  Synthetic
  modified_base (4)..(4): methylated C nucleotide
  modified_base (9)..(9): methylated C nucleotide
gggcggggcgacctgggatc

SEQ ID NO: 1432 - DNA, 18 bp, Artificial Sequence
  Synthetic
  modified_base (4)..(4): methylated C nucleotide
  modified_base (9)..(9): methylated C nucleotide
gggcggggcgacctggga

SEQ ID NO: 1433 - DNA, 16 bp, Artificial Sequence
  Synthetic
  modified_base (4)..(4): methylated C nucleotide
  modified_base (9)..(9): methylated C nucleotide
gggcggggcgacctgg

SEQ ID NO: 1434 - DNA, 15 bp, Artificial Sequence
  Synthetic
  modified_base (4)..(4): methylated C nucleotide
  modified_base (9)..(9): methylated C nucleotide
gggcggggcgacctg

SEQ ID NO: 1435 - DNA, 33 bp, Artificial Sequence
  Synthetic
  modified_base (4)..(4): methylated C nucleotide
  modified_base (9)..(9): methylated C nucleotide
  modified_base (31)..(31): methylated C nucleotide
gggcggggcgacctggcatcccaggcctggcgg

SEQ ID NO: 1436 - DNA, 33 bp, Artificial Sequence
  Synthetic
  modified_base (4)..(4): methylated C nucleotide
  modified_base (9)..(9): methylated C nucleotide
  modified_base (31)..(31): methylated C nucleotide
gggcggggcgatctgggatcccaggcctggcgg

SEQ ID NO: 1437 - DNA, 33 bp, Artificial Sequence
  Synthetic
  modified_base (4)..(4): methylated C nucleotide
  modified_base (9)..(9): methylated C nucleotide
  modified_base (31)..(31): methylated C nucleotide
gggcggggcgacctgggatcccaggcctgccgg

SEQ ID NO: 1438 - DNA, 24 bp, Artificial Sequence
  Synthetic
  modified_base (3)..(3): methylated C nucleotide
  modified_base (7)..(7): methylated C nucleotide
  modified_base (9)..(9): methylated C nucleotide
  modified_base (17)..(17): methylated C nucleotide
  modified_base (21)..(21): methylated C nucleotide
cacgcacgcgcatccccgcccgtg

SEQ ID NO: 1439 - DNA, 24 bp, Artificial Sequence
  Synthetic
cacgcacgcgcatccccgcccgtg

1. A composition comprising a first oligonucleotide that hybridizes under physiological conditions to the promoter region of a c-ki-Ras gene.

2. The composition of claim 1, wherein said first oligonucleotide is selected from the group consisting of SEQ ID NOs: 47, 48, 50 and 53.

3. The composition of claim 1, wherein at least one of the cytosine bases in said first oligonucleotide is 5-methylcytosine.

4. The composition of claim 3, wherein all of said cytosine bases in said first oligonucleotide are 5-methylcytosine.

5. The composition of claim 4, wherein said hybridization of said first oligonucleotide to said promoter region of c-ki-Ras inhibits expression of said c-ki-Ras gene.

6. The composition of claim 5, wherein said c-ki-Ras gene is on a chromosome of a cell, and wherein said hybridization of said first oligonucleotide to said promoter region of c-ki-Ras reduces proliferation of said cell.

7. The composition of claim 1, further comprising a second oligonucleotide.

8. The composition of claim 7, wherein at least one of the cytosine bases in said second oligonucleotide is 5-methylcytosine.

9. The composition of claim 7, wherein said second oligonucleotide is selected from the group consisting of SEQ ID NOs: 47, 48, 50 and 53, and wherein said second oligonucleotide is different than said first oligonucleotide.

10. The composition of claim 7, wherein said second oligonucleotide hybridizes to a promoter region of a second gene, wherein said second gene is not c-ki-Ras.

11. The composition of claim 10, wherein said second gene is an oncogene.

12. The composition of claim 11, wherein said oncogene is selected from the group consisting of c-Ha-Ras, c-myc, Her-2, TGF-α, and bcl-2.

13. A composition comprising an oligonucleotide that hybridizes to a promoter region of a c-ki-Ras gene at a position selected from the group consisting of between nucleotides 1 and 289 of SEQ ID NO: 46 and between nucleotide 432 and 658 of SEQ ID NO: 46.

14. A method, comprising
a) providing
i) an oligonucleotide selected from the group consisting of SEQ ID NOs: 47, 48, 50 and 53; and
ii) a cell comprising a c-ki-Ras gene, wherein said c-ki-ras gene is capable of expression, and wherein said cell is capable of proliferation; and
b) introducing said oligonucleotide to said cell.

15. The method of claim 14, wherein said introducing results in the reduction of proliferation of said cell.

16. The method of claim 14, wherein said introducing results in inhibition of expression of said c-ki-Ras gene.

17. The method of claim 14, wherein said cell is a cancer cell.

18. The method of claim 14, wherein said cell is in a host animal.

19. The method of claim 18, wherein said host animal is a non-human mammal.

20. The method of claim 18, wherein said host animal is a human.

21. The method of claim 18, wherein said oligonucleotide is introduced to said host animal at a dosage of between 0.01 μg to 100 g.

22. The method of claim 18, wherein said oligonucleotide is introduced to said host animal at a dosage of between 1 mg to 100 mg per kg of body weight.

23. The method of claim 18, wherein said oligonucleotide is introduced to said host animal one or more times per day.

24. The method of claim 18, wherein said oligonucleotide is introduced to said host animal continuously.

25. The method of claim 14, wherein said cell is in cell culture.

26. The method of claim 14, further comprising the step of introducing a test compound to said cell.

27. The method of claim 26, wherein said test compound is a known chemotherapy agent.

28. The method of claim 16, wherein said cancer is selected from the group consisting of pancreatic cancer, colon cancer, breast cancer, bladder cancer, lung cancer, leukemia, prostate, lymphoma, ovarian, and melanoma.

29. The method of claim 19, further comprising providing a drug delivery system for introducing said oligonucleotide to said cell.

30. The method of claim 29, wherein said drug delivery system comprises a liposome, said liposome selected from the group consisting of a neutral lipid and a lipid like compound.

31. The method of claim 29, wherein said drug delivery system comprises a cell targeting component.

32. The method of claim 31, wherein said cell targeting compound is selected from the group consisting of a ligand for a cell surface receptor and a ligand for a nuclear receptor.

33. The method of claim 29, wherein said drug delivery system is for use in vivo, and wherein oligonucleotide and said liposome are present in the ratio of from 2:1 to 1:3/1 μg to 100 mg per kg body weight.

34. A method, comprising
a) providing
i) an oligonucleotide that hybridizes to the promoter region of a c-ki-Ras gene; and
ii) a cell comprising a c-ki-Ras gene; and
b) introducing said oligonucleotide to said cell.

35. The method of claim 34, wherein said oligonucleotide hybridizes to a promoter region of a c-ki-Ras gene at a position selected from the group consisting of between nucleotides 1 and 289 of SEQ ID NO: 46 and between nucleotide 432 and 658 of SEQ ID NO: 46.

36. The method of claim 34, wherein said oligonucleotide is between 15 and 30 bases in length.

37. The method of claim 34, wherein said at least one of the cytosine bases in said oligonucleotide is 5-methylcytosine.

38. The method of claim 34, wherein all of said cytosine bases in said oligonucleotide are 5-methylcytosine.
